(19) United States
(12) Patent Application Publication
(10) Pub. No.: US 2024/0384007 A1
(43) Pub. Date: Nov. 21, 2024

(54) COMPOSITIONS AND METHODS FOR SELECTIVE PROTEIN DEGRADATION

(71) Applicant: Novartis AG, Basel (CH)

(72) Inventors: James E. Bradner, Weston, MA (US); Andrei Golosov, Cambridge, MA (US); Carleton Proctor Goold, Brighton, MA (US); Carla Patricia Pinto Guimaraes, Boston, MA (US); Marc Horst Peter Hild, Wellesley, MA (US); Gregory Motz, Quincy, MA (US); Nathan Thomas Ross, Cambridge, MA (US); Jonathan M. Solomon, Somerville, MA (US); Rohan Eric John Beckwith, Maynard, MA (US); Seth Carbonneau, Roxbury, MA (US)

(21) Appl. No.: 18/629,314

(22) Filed: Apr. 8, 2024

Related U.S. Application Data
(62) Division of application No. 16/757,026, filed on Apr. 17, 2020, now Pat. No. 11,999,802.
(60) Provisional application No. 62/574,188, filed on Oct. 18, 2017.

(51) Int. Cl. C07K 19/00; A61K 31/4545; A61K 31/46; A61K 35/12; C07D 209/48; C07D 213/81; C07D 401/14; C07D 451/02; C07K 14/435; C07K 14/705; C07K 14/725; C07K 16/18; C07K 16/28; C12N 9/06; C12N 15/63; C12N 15/86; G01N 33/68

(52) U.S. Cl. CPC C07K 19/00; A61K 31/4545; A61K 31/46; A61K 35/12; C07D 209/48; C07D 213/81; C07D 401/14; C07D 451/02; C07K 14/435; C07K 14/705; C07K 14/7051; C07K 14/70521; C07K 14/70575; C07K 16/18; C07K 16/2803; C07K 16/2815; C07K 16/2863; C07K 16/2875; C07K 16/2887; C07K 16/2896; C12N 9/003; C12N 15/63; C12N 15/86; C12Y 105/01003; G01N 33/6803; C07K 2317/622; C07K 2319/02; C07K 2319/03; C07K 2319/20; C07K 2319/35; C07K 2319/81; C07K 2319/95; C12N 2740/15043

(57) ABSTRACT

The invention provides compositions including a fusion polypeptide and methods for making a fusion polypeptide that includes a COF1/CRBN-binding polypeptide, COF2/CRBN-binding polypeptide, or COF3/CRBN-binding polypeptide and a heterologous polypeptide of interest.

### RELATED APPLICATION

[0001] This application is a divisional of U.S. patent application Ser. No. 16/757,026, filed Apr. 17, 2020, now allowed, which is a U.S. National Stage Application under 35 U.S.C. § 371 of International Application No. PCT/US2018/056472, filed Oct. 18, 2018, which claims priority to U.S. Ser. No. 62/574,188 filed Oct. 18, 2017, the contents of which are incorporated herein by reference in their entireties.

### SEQUENCE LISTING

[0002] The instant application contains a Sequence Listing which has been submitted electronically in XML format and is hereby incorporated by reference in its entirety. Said XML copy, created on Apr. 1, 2024, is named N2067-713640_SL.xml and is 2,413,836 bytes in size.

### BACKGROUND OF THE INVENTION

[0003] Many therapeutic proteins have been developed as important medications for preventing or treating diseases. Side effects can occur during or after the treatment, varying from a loss of drug efficacy to serious toxicities. It is desirable to develop strategies to modulate the expression level of the therapeutic proteins, e.g., to modulate the levels of the therapeutic proteins to increase efficacy and/or decrease side effects.

### SUMMARY OF THE INVENTION

[0004] The present disclosure provides, at least in part, a fusion polypeptide comprising a compound of Formula (I) (COF1)/CRBN-binding polypeptide, a compound of Formula (II) (COF2)/CRBN-binding polypeptide, or a compound of Formula (III) (COF3)/CRBN-binding polypeptide for targeted protein inactivation. In some embodiments, the fusion polypeptide includes one or more COF1/CRBN-, COF2/CRBN-, or COF3/CRBN-binding polypeptides and one or more heterologous polypeptides, e.g., polypeptides of interest. The COF1/CRBN-, COF2/CRBN-, or COF3/CRBN-binding polypeptide can be operably linked to the heterologous polypeptide, e.g., via a linker. In some embodiments, in the presence of COF1 or COF2 (such as thalidomide and derivatives thereof (e.g., lenalidomide, pomalidomide, and thalidomide)), or in the presence of COF3 (e.g., a compound disclosed in Table 29) the COF1/CRBN-, COF2/CRBN-, or COF3/CRBN-binding polypeptide alters the level and/or activity of the fusion polypeptide; for example, increases degradation, e.g., proteosomal degradation, of the fusion polypeptide. In some embodiments, the degradation of the fusion polypeptide is ubiquitin-dependent.

[0005] Without wishing to be bound by theory, in some embodiments, the COF1/CRBN-, COF2/CRBN-, or COF3/CRBN-binding polypeptide provides an amino acid sequence and/or a structural motif that, in the presence of COF1 or COF2 (such as thalidomide and derivatives thereof (e.g., lenalidomide, pomalidomide, and thalidomide)), or in the presence of COF3 (e.g., a compound disclosed in Table 29), results in a post-translational modification (e.g., ubiquitination) of the fusion polypeptide, resulting in a modified, e.g., ubiquitinated, fusion polypeptide. For example, one or more amino acids, e.g., lysine or methionine, in the fusion polypeptide can be ubiquitinated, in the presence of COF1, COF2, or COF3. In some embodiments, the ubiquitinated fusion polypeptide is selectively degraded. In some embodiments, the post-translational modification of the fusion polypeptide increases the degradation (e.g., an increased level and/or rate of degradation) of the fusion polypeptide. In some embodiments, the level and/or rate of degradation is increased by at least 1.5-, 2-, 3-, 4-, 5-, 10-, 20-, 30-, 40-, or 50-fold relative to the level and/or rate of degradation of a reference polypeptide, e.g., the fusion polypeptide in the absence of COF1, COF2, or COF3, the heterologous polypeptide, or a fusion of the heterologous polypeptide without the COF1/CRBN-, COF2/CRBN-, or COF3/CRBN-binding polypeptide, or with a moiety other than the COF1/CRBN-, COF2/CRBN-, or COF3/CRBN-binding polypeptide.

[0006] In one aspect, provided herein is a fusion polypeptide comprising a compound of Formula (I) (COF1)/CRBN-binding polypeptide and a heterologous polypeptide, wherein the compound of Formula (I) is:

[chemical structure]

or a pharmaceutically acceptable salt, ester, hydrate, solvate, or tautomer thereof, wherein:
[0007] X is O or S;
[0008] R¹ is C₁-C₆ alkyl, C₂-C₆ alkenyl, C₂-C₆ alkynyl, C₁-C₆ heteroalkyl, carbocyclyl, heterocyclyl, aryl, or heteroaryl, each of which is independently and optionally substituted by one or more R⁴;
[0009] each of R^{2a} and R^{2b} is independently hydrogen or C₁-C₆ alkyl; or R^{2a} and R^{2b} together with the carbon atom to which they are attached form a carbonyl group or a thiocarbonyl group;
[0010] each of R³ is independently C₁-C₆ alkyl, C₂-C₆ alkenyl, C₂-C₆ alkynyl, C₁-C₆ heteroalkyl, halo, cyano, —C(O)R^{A}, —C(O)OR^{B}, —OR^{B}, —N(R^{C})(R^{D}), —C(O)N(R^{C})(R^{D}), —N(R^{C})C(O)R^{A}, —S(O)ₓR^{E}, —S(O)ₓN(R^{C})(R^{D}), or —N(R^{C})S(O)ₓR^{E}, wherein each alkyl, alkenyl, alkynyl, and heteroalkyl is independently and optionally substituted with one or more R⁶.
[0011] each R⁴ is independently C₁-C₆ alkyl, C₂-C₆ alkenyl, C₂-C₆ alkynyl, C₁-C₆ heteroalkyl, halo, cyano, oxo, —C(O)R^{A}, —C(O)OR^{B}, —OR^{B}, —N(R^{C})(R^{D}), —C(O)N(R^{C})(R^{D}), —N(R^{C})C(O)R^{A}, —S(O)ₓR^{E}, —S(O)ₓN(R^{C})(R^{D}), —N(R^{C})S(O)ₓR^{E}, carbocyclyl, heterocyclyl, aryl, or heteroaryl, wherein each alkyl, alkenyl, alkynyl, heteroalkyl, carbocyclyl, heterocyclyl, aryl, and heteroaryl is independently and optionally substituted with one or more R⁷;
[0012] each of R^{A}, R^{B}, R^{C}, R^{D}, and R^{E} is independently hydrogen or C₁-C₆ alkyl;
[0013] each R⁶ is independently C₁-C₆ alkyl, oxo, cyano, —OR^{B}, —N(R^{C})(R^{D}), —C(O)N(R^{C})(R^{D}), —N(R^{C})C(O)R^{A}, aryl, or heteroaryl, wherein each aryl and heteroaryl is independently and optionally substituted with one or more R⁸.
[0014] each R⁷ is independently halo, oxo, cyano, —OR^{B}, —N(R^{C})(R^{D}), —C(O)N(R^{C})(R^{D}), or —N(R^{C})C(O)R^{A};
[0015] each R⁸ is independently C₁-C₆ alkyl, cyano, —OR^{B}, —N(R^{C})(R^{D}), —C(O)N(R^{C})(R^{D}), or —N(R^{C})C(O)R^{A};
[0016] n is 0, 1, 2, 3 or 4; and
[0017] x is 0, 1, or 2.

[0018] In some embodiments, the heterologous polypeptide is a heterologous mammalian polypeptide. In some embodiments, the heterologous polypeptide is a heterologous bacterial polypeptide. In some embodiments, the heterologous polypeptide is a heterologous viral polypeptide. In some embodiments, the heterologous polypeptide comprises an amino acid sequence from, or derived from, a mammalian polypeptide, a bacterial polypeptide, a viral polypeptide, a plant polypeptide, a yeast polypeptide, a fungi polypeptide, an archaebacterial polypeptide, a fish, e.g., Zebrafish, polypeptide. In some embodiments, the heterologous polypeptide comprises a polypeptide in Table 2, e.g., a cytoplasmic and/or nuclear polypeptide, or a transmembrane polypeptide as described in Table 2.

[0019] In some embodiments, the COF1/CRBN-binding polypeptide is fused to the heterologous polypeptide. In some embodiments, the COF1/CRBN-binding polypeptide and the heterologous polypeptide are linked by a peptide bond. In some embodiments, the COF1/CRBN-binding polypeptide and the heterologous polypeptide are linked by a bond other than a peptide bond. In some embodiments, the heterologous polypeptide is linked directly to the COF1/CRBN-binding polypeptide. In some embodiments, the heterologous polypeptide is linked indirectly to the COF1/CRBN-binding polypeptide. In some embodiments, the COF1/CRBN-binding polypeptide and the heterologous polypeptide are operatively linked via a linker, e.g., a glycine-serine linker, e.g., a linker comprising the amino acid sequence of SEQ ID NO: 28. In some embodiments, the linker comprises an amino acid sequence selected from the group consisting of SEQ ID NOs: 28, 37, 38, 39, and 99.

[0020] In some embodiments, the COF1/CRBN-binding polypeptide is linked to the C-terminus of the heterologous polypeptide. In some embodiments, the COF1/CRBN-binding polypeptide is linked to the N-terminus of the heterologous polypeptide. In some embodiments, the COF1/CRBN-binding polypeptide is at the middle of the heterologous polypeptide.

[0021] In some embodiments, the association of the COF1/CRBN-binding polypeptide with cereblon (CRBN) in the absence of COF1 is no more than, e.g., 0.01%, 0.1%, 1%, 5%, 10%, 15%, or 20%, of the association of the COF1/CRBN-binding polypeptide with CRBN in the presence of COF1, e.g., an excess of COF1, e.g., as measured by an assay described herein, e.g., immunoprecipitation. In some embodiments, the COF1/CRBN-binding polypeptide does not bind to CRBN in the absence of COF1. In some embodiments, the association of the fusion polypeptide with CRBN in the absence of COF1 is no more than, e.g., 0.01%, 0.1%, 1%, 5%, 10%, 15%, or 20%, of the association of the fusion polypeptide with CRBN in the presence of COF1, e.g., an excess of COF1, e.g., as measured by an assay described herein, e.g., immunoprecipitation. In some embodiments, the fusion polypeptide does not bind to CRBN in the absence of COF1. In some embodiments, the association or binding is as measured in a mammalian cell, e.g., a human cell.

[0022] In some embodiments, the ubiquitination of the heterologous polypeptide in the absence of COF1 is no more than, e.g., 0.01%, 0.1%, 1%, 10%, 20%, 30%, 40%, 50%, 60%, or 70%, of the ubiquitination of the heterologous polypeptide in the presence of COF1, e.g., an excess of COF1, e.g., as measured by an assay described herein. In some embodiments, the ubiquitination of the fusion polypeptide in the absence of COF1 is no more than, e.g., 0.01%, 0.1%, 1%, 10%, 20%, 30%, 40%, 50%, 60%, or 70%, of the ubiquitination of the fusion polypeptide in the presence of COF1, e.g., an excess of COF1, e.g., as measured by an assay described herein. In some embodiments, the heterologous polypeptide or the fusion polypeptide is ubiquitinated at one or more lysine or methionine residues in the presence of COF1. In some embodiments, the ubiquitination is as measured in a mammalian cell, e.g., a human cell.

[0023] In some embodiments, the degradation of the fusion polypeptide in the absence of COF1 is no more than, e.g., 0.01%, 0.1%, 1%, 10%, 20%, 30%, 40%, 50%, 60%, or 70% of the degradation of the fusion polypeptide in the presence of COF1, e.g., an excess of COF1, e.g., as measured by an assay described herein, e.g., a Western blot analysis or a flow cytometry analysis. In some embodiments, the degradation of the fusion polypeptide is mediated by ubiquitination in the presence of COF1. In some embodiments, the degradation of the fusion polypeptide is mediated by the lysosome. In some embodiments, the degradation is as measured in a mammalian cell, e.g., a human cell.

[0024] In some embodiments, the fusion polypeptide is a cell surface polypeptide. In some embodiments, the rate of recycling of the fusion polypeptide from the cell surface to an intracellular compartment in the absence of COF1 is no more than, e.g., 10%, 20%, 30%, 40%, 50%, 60%, 70%, 80%, or 90% of the recycling of the fusion polypeptide from the cell surface to an intracellular compartment in the presence of COF1, e.g., an excess of COF1, e.g., as measured by an assay described herein. In some embodiments, the recycling is as measured in a mammalian cell, e.g., a human cell.

[0025] In some embodiments, the COF1/CRBN-binding polypeptide is between 10 and 95 amino acid residues in length, between 15 and 90 amino acid residues in length, between 20 and 85 amino acid residues in length, between 25 and 80 amino acid residues in length, between 30 and 75 amino acid residues in length, between 35 and 70 amino acid residues in length, between 40 and 65 amino acid residues in length, between 45 and 65 amino acid residues in length, between 50 and 65 amino acid residues in length, or between 55 and 65 amino acid residues in length.

[0026] In some embodiments, the COF1/CRBN-binding polypeptide comprises a beta turn. In some embodiments, the COF1/CRBN-binding polypeptide comprises a beta turn of IKZF1 or IKZF3 (e.g., human IKZF1 or IKZF3). In some embodiments, the COF1/CRBN-binding polypeptide comprises a beta hairpin. In some embodiments, the COF1/CRBN-binding polypeptide comprises a beta hairpin of IKZF1 or IKZF3 (e.g., human IKZF1 or IKZF3). In some embodiments, the COF1/CRBN-binding polypeptide comprises a beta strand. In some embodiments, the COF1/CRBN-binding polypeptide comprises a beta strand of IKZF1 or IKZF3 (e.g., human IKZF1 or IKZF3). In some embodiments, the COF1/CRBN-binding polypeptide comprises an alpha helix. In some embodiments, the COF1/CRBN-binding polypeptide comprises an alpha helix of IKZF1 or IKZF3 (e.g., human IKZF1 or IKZF3). In some embodiments, the COF1/CRBN-binding polypeptide comprises, from N-terminus to C-terminus, a first beta strand, a beta hairpin, a second beta strand, and a first alpha helix. In some embodiments, the COF1/CRBN-binding polypeptide comprises, from N-terminus to C-terminus, a first beta strand, a beta hairpin, a second beta strand, and a first alpha helix of IKZF1 or IKZF3 (e.g., human IKZF1 or IKZF3). In some embodiments, the COF1/CRBN-binding polypeptide comprises, from N-terminus to C-terminus, a first beta strand, a beta hairpin, a second beta strand, a first alpha helix, and a second alpha helix. In some embodiments, the COF1/CRBN-binding polypeptide comprises, from N-terminus to C-terminus, a first beta strand, a beta hairpin, a second beta strand, a first alpha helix, and a second alpha helix of IKZF1 or IKZF3 (e.g., human IKZF1 or IKZF3). In some embodiments, the beta hairpin and the second alpha helix are separated by no more than 60, 50, 40, or 30 amino acid residues.

[0027] In some embodiments, the COF1/CRBN-binding polypeptide comprises a COF1/CRBN-binding sequence from a naturally occurring polypeptide or a COF1/CRBN-binding variant thereof. In some embodiments, the COF1/CRBN-binding polypeptide comprises a COF1/CRBN-binding sequence from a naturally occurring IKZF polypeptide or a COF1/CRBN-binding variant thereof. In some embodiments, the COF1/CRBN-binding polypeptide comprises a COF1/CRBN-binding sequence from a naturally occurring IKZF1, IKZF2, IKZF3, IKZF4, or IKZF5, or a COF1/CRBN-binding variant thereof. In some embodiments, the COF1/CRBN-binding sequence comprises two or more discontinuous sequences from the naturally occurring polypeptide, e.g., a naturally occurring IKZF polypeptide, e.g., a naturally occurring IKZF1, IKZF2, IKZF3, IKZF4, or IKZF5.

[0028] In some embodiments, the COF1/CRBN-binding polypeptide comprises an IKZF polypeptide or a structural motif thereof.

[0029] In some embodiments, the IKZF polypeptide is an IKZF1 polypeptide, an IKZF3 polypeptide, an IKZF2 polypeptide having H141Q substitution (numbered according to SEQ ID NO: 21), or an IKZF4 polypeptide having H188Q substitution (numbered according to SEQ ID NO: 22).

[0030] In some embodiments, the COF1/CRBN-binding polypeptide comprises sufficient amino acid sequence and/or a structural motif from IKZF (e.g., IKZF1 or IKZF3) that:
[0031] i) the association of the COF1/CRBN-binding polypeptide with CRBN in the absence of COF1 is no more than, e.g., 0.01%, 0.1%, 1%, 5%, 10%, 15%, or 20%, of the association of the COF1/CRBN-binding polypeptide with CRBN in the presence of COF1, e.g., an excess of COF1, e.g., as measured by an assay described herein, e.g., immunoprecipitation;
[0032] ii) the association of the fusion polypeptide with CRBN in the absence of COF1 is no more than, e.g., 0.01%, 0.1%, 1%, 5%, 10%, 15%, or 20% of the association of the fusion polypeptide with CRBN in the presence of COF1, e.g., an excess of COF1, e.g., as measured by an assay described herein, e.g., immunoprecipitation;
[0033] iii) the ubiquitination of the heterologous polypeptide in the absence of COF1 is no more than, e.g., 0.01%, 0.1%, 1%, 10%, 20%, 30%, 40%, 50%, 60%, or 70%, of the ubiquitination of the heterologous polypeptide in the presence of COF1, e.g., an excess of COF1, e.g., as measured by an assay described herein;
[0034] iv) the ubiquitination of the fusion polypeptide in the absence of COF1 is no more than, e.g., 0.01%, 0.1%, 1%, 10%, 20%, 30%, 40%, 50%, 60%, or 70%, of the ubiquitination of the fusion polypeptide in the presence of COF1, e.g., an excess of COF1, e.g., as measured by an assay described herein; or
[0035] v) the degradation of the fusion polypeptide in the absence of COF1 is no more than, e.g., 0.01%, 0.1%, 1%, 10%, 20%, 30%, 40%, 50%, 60%, or 70%, of the degradation of the fusion polypeptide in the presence of COF1, e.g., an excess of COF1, e.g., as measured by an assay described herein, e.g., a Western blot analysis or a flow cytometry analysis.

[0036] In some embodiments, the association, ubiquitination, and/or degradation is as measured in a mammalian cell, e.g., a human cell.

[0037] In some embodiments, the COF1/CRBN-binding polypeptide comprises about 10 to about 95 amino acid residues, about 15 to about 90 amino acid residues, about 20 to about 85 amino acid residues, about 25 to about 80 amino acid residues, about 30 to about 75 amino acid residues, about 35 to about 70 amino acid residues, about 40 to about 65 amino acid residues, about 45 to about 65 amino acid residues, about 50 to about 65 amino acid residues, or about 55 to about 65 amino acid residues of IKZF1 or IKZF3.

[0038] In some embodiments, the COF1/CRBN-binding polypeptide comprises sufficient amino acid sequence and/or a structural motif from amino acid residues 136-180 of IKZF3 (numbered according to SEQ ID NO: 19) (e.g., sufficient amino acid sequence and/or a structural motif from amino acid residues 136-180 of SEQ ID NO: 19) that:
[0039] i) the association of the COF1/CRBN-binding polypeptide with CRBN in the absence of COF1 is no more than, e.g., 0.01%, 0.1%, 1%, 5%, 10%, 15%, or 20%, of the association of the COF1/CRBN-binding polypeptide with CRBN in the presence of COF1, e.g., an excess of COF1, e.g., as measured by an assay described herein, e.g., immunoprecipitation;
[0040] ii) the association of the fusion polypeptide with CRBN in the absence of COF1 is no more than, e.g., 0.01%, 0.1%, 1%, 5%, 10%, 15%, or 20% of the association of the fusion polypeptide with CRBN in the presence of COF1, e.g., an excess of COF1, e.g., as measured by an assay described herein, e.g., immunoprecipitation;
[0041] iii) the ubiquitination of the heterologous polypeptide in the absence of COF1 is no more than, e.g., 0.01%, 0.1%, 1%, 10%, 20%, 30%, 40%, 50%, 60%, or 70%, of the ubiquitination of the heterologous polypeptide in the presence of COF1, e.g., an excess of COF1, e.g., as measured by an assay described herein;
[0042] iv) the ubiquitination of the fusion polypeptide in the absence of COF1 is no more than, e.g., 0.01%, 0.1%, 1%, 10%, 20%, 30%, 40%, 50%, 60%, or 70%, of the ubiquitination of the fusion polypeptide in the presence of COF1, e.g., an excess of COF1, e.g., as measured by an assay described herein; or
[0043] v) the degradation of the fusion polypeptide in the absence of COF1 is no more than, e.g., 0.01%, 0.1%, 1%, 10%, 20%, 30%, 40%, 50%, 60%, or 70%, of the degradation of the fusion polypeptide in the presence of COF1, e.g., an excess of COF1, e.g., as measured by an assay described herein, e.g., a Western blot analysis or a flow cytometry analysis.

[0044] In some embodiments, the association, ubiquitination, and/or degradation is as measured in a mammalian cell, e.g., a human cell.

[0045] In some embodiments, the COF1/CRBN-binding polypeptide comprises amino acid residues 136-180 of IKZF3 (numbered according to SEQ ID NO: 19) (e.g., the COF1/CRBN-binding polypeptide comprises the amino acid sequence of SEQ ID NO: 5) or a sequence that differs from amino acid residues 136-180 of IKZF3 (numbered according to SEQ ID NO: 19) by no more than 1, 2, 3, 4, 5, 10, 15, 20, 25, 30, 35, or 40 amino acid residues (e.g., a sequence that differs from amino acid residues 136-180 of SEQ ID NO: 19 by no more than 1, 2, 3, 4, 5, 10, 15, 20, 25, 30, 35, or 40 amino acid residues) (e.g., a sequence having no more than 1, 2, 3, 4, 5, 10, 15, 20, 25, 30, 35, or 40 amino acid substitutions from amino acid residues 136-180 of SEQ ID NO: 19).

[0046] In some embodiments, the COF1/CRBN-binding polypeptide comprises sufficient amino acid sequence and/or a structural motif from amino acid residues 136-170 of IKZF3 (numbered according to SEQ ID NO: 19) (e.g., sufficient amino acid sequence and/or a structural motif from amino acid residues 136-170 of SEQ ID NO: 19) that:
[0047] i) the association of the COF1/CRBN-binding polypeptide with CRBN in the absence of COF1 is no more than, e.g., 0.01%, 0.1%, 1%, 5%, 10%, 15%, or 20%, of the association of the COF1/CRBN-binding polypeptide with CRBN in the presence of COF1, e.g., an excess of COF1, e.g., as measured by an assay described herein, e.g., immunoprecipitation;
[0048] ii) the association of the fusion polypeptide with CRBN in the absence of COF1 is no more than, e.g., 0.01%, 0.1%, 1%, 5%, 10%, 15%, or 20% of the association of the fusion polypeptide with CRBN in the presence of COF1, e.g., an excess of COF1, e.g., as measured by an assay described herein, e.g., immunoprecipitation;
[0049] iii) the ubiquitination of the heterologous polypeptide in the absence of COF1 is no more than, e.g., 0.01%, 0.1%, 1%, 10%, 20%, 30%, 40%, 50%, 60%, or 70%, of the ubiquitination of the heterologous polypeptide in the presence of COF1, e.g., an excess of COF1, e.g., as measured by an assay described herein;
[0050] iv) the ubiquitination of the fusion polypeptide in the absence of COF1 is no more than, e.g., 0.01%, 0.1%, 1%, 10%, 20%, 30%, 40%, 50%, 60%, or 70%, of the ubiquitination of the fusion polypeptide in the presence of COF1, e.g., an excess of COF1, e.g., as measured by an assay described herein; or
[0051] v) the degradation of the fusion polypeptide in the absence of COF1 is no more than, e.g., 0.01%, 0.1%, 1%, 10%, 20%, 30%, 40%, 50%, 60%, or 70%, of the degradation of the fusion polypeptide in the presence of COF1, e.g., an excess of COF1, e.g., as measured by an assay described herein, e.g., a Western blot analysis or a flow cytometry analysis.

[0052] In some embodiments, the association, ubiquitination, and/or degradation is as measured in a mammalian cell, e.g., a human cell.

[0053] In some embodiments, the COF1/CRBN-binding polypeptide comprises amino acid residues 136-170 of IKZF3 (numbered according to SEQ ID NO: 19) (e.g., the COF1/CRBN-binding polypeptide comprises the amino acid sequence of SEQ ID NO: 6) or a sequence that differs from amino acid residues 136-170 of IKZF3 (numbered according to SEQ ID NO: 19) by no more than 1, 2, 3, 4, 5, 10, 15, 20, 25, or 30 amino acid residues (e.g., a sequence that differs from amino acid residues 136-170 of SEQ ID NO: 19 by no more than 1, 2, 3, 4, 5, 10, 15, 20, 25, or 30 amino acid residues) (e.g., a sequence having no more than 1, 2, 3, 4, 5, 10, 15, 20, 25, or 30 amino acid substitutions from amino acid residues 136-170 of SEQ ID NO: 19).

[0054] In some embodiments, one, two, three or all of the following amino acid residues remain unaltered: glutamine at position 147, cysteine at position 148, glutamine at position 150, glycine at position 152, leucine at position 161, or leucine at position 162, numbered according to SEQ ID NO: 19. In some embodiments, glutamine at position 147 remains unaltered, numbered according to SEQ ID NO: 19. In some embodiments, cysteine at position 148 remains unaltered, numbered according to SEQ ID NO: 19. In some embodiments, glutamine at position 150 remains unaltered, numbered according to SEQ ID NO: 19. In some embodiments, glycine at position 152 remains unaltered, numbered according to SEQ ID NO: 19. In some embodiments, leucine at position 161 remains unaltered, numbered according to SEQ ID NO: 19. In some embodiments, leucine at position 162 remains unaltered, numbered according to SEQ ID NO: 19.

[0055] In some embodiments, the COF1/CRBN-binding polypeptide comprises amino acid residues 136-139 of IKZF3 (numbered according to SEQ ID NO: 19), e.g., the COF1/CRBN-binding polypeptide comprises the amino acid sequence of SEQ ID NO: 40.

[0056] In some embodiments, the COF1/CRBN-binding polypeptide comprises amino acid residues 136-180 of IKZF3 (numbered according to SEQ ID NO: 19). In some embodiments, the COF1/CRBN-binding polypeptide comprises the amino acid sequence of SEQ ID NO: 5. In some embodiments, the COF1/CRBN-binding polypeptide comprises the amino acid sequence of SEQ ID NO: 77. In some embodiments, the COF1/CRBN-binding polypeptide consists of the amino acid sequence of SEQ ID NO: 5. In some embodiments, the COF1/CRBN-binding polypeptide consists of the amino acid sequence of SEQ ID NO: 5.

[0057] In some embodiments, the COF1/CRBN-binding polypeptide comprises amino acid residues 136-170 of IKZF3 (numbered according to SEQ ID NO: 19). In some embodiments, the COF1/CRBN-binding polypeptide comprises the amino acid sequence of SEQ ID NO: 6. In some embodiments, the COF1/CRBN-binding polypeptide comprises the amino acid sequence of SEQ ID NO: 78. In some embodiments, the COF1/CRBN-binding polypeptide consists of the amino acid sequence of SEQ ID NO: 6. In some embodiments, the COF1/CRBN-binding polypeptide consists of the amino acid sequence of SEQ ID NO: 78.

[0058] In some embodiments, the COF1/CRBN-binding polypeptide comprises sufficient amino acid sequence and/or a structural motif from amino acid residues 236-249 of IKZF3 (numbered according to SEQ ID NO: 19) (e.g., sufficient amino acid sequence and/or a structural motif from amino acid residues 236-249 of SEQ ID NO: 19) that:
[0059] i) the association of the COF1/CRBN-binding polypeptide with CRBN in the absence of COF1 is no more than, e.g., 0.01%, 0.1%, 1%, 5%, 10%, 15%, or 20%, of the association of the COF1/CRBN-binding polypeptide with CRBN in the presence of COF1, e.g., an excess of COF1, e.g., as measured by an assay described herein, e.g., immunoprecipitation;
[0060] ii) the association of the fusion polypeptide with CRBN in the absence of COF1 is no more than, e.g., 0.01%, 0.1%, 1%, 5%, 10%, 15%, or 20% of the association of the fusion polypeptide with CRBN in the presence of COF1, e.g., an excess of COF1, e.g., as measured by an assay described herein, e.g., immunoprecipitation;
[0061] iii) the ubiquitination of the heterologous polypeptide in the absence of COF1 is no more than, e.g., 0.01%, 0.1%, 1%, 10%, 20%, 30%, 40%, 50%, 60%, or 70%, of the ubiquitination of the heterologous polypeptide in the presence of COF1, e.g., an excess of COF1, e.g., as measured by an assay described herein;
[0062] iv) the ubiquitination of the fusion polypeptide in the absence of COF1 is no more than, e.g., 0.01%, 0.1%, 1%, 10%, 20%, 30%, 40%, 50%, 60%, or 70%, of the ubiquitination of the fusion polypeptide in the presence of COF1, e.g., an excess of COF1, e.g., as measured by an assay described herein; or
[0063] v) the degradation of the fusion polypeptide in the absence of COF1 is no more than, e.g., 0.01%, 0.1%, 1%, 10%, 20%, 30%, 40%, 50%, 60%, or 70%, of the degradation of the fusion polypeptide in the presence of COF1, e.g., an excess of COF1, e.g., as measured by an assay described herein, e.g., a Western blot analysis or a flow cytometry analysis.

[0064] In some embodiments, the association, ubiquitination, and/or degradation is as measured in a mammalian cell, e.g., a human cell.

[0065] In some embodiments, the COF1/CRBN-binding polypeptide comprises amino acid residues 236-249 of IKZF3 (numbered according to SEQ ID NO: 19) (e.g., the COF1/CRBN-binding polypeptide comprises the amino acid sequence of SEQ ID NO: 11) or a sequence that differs from amino acid residues 236-249 of IKZF3 (numbered according to SEQ ID NO: 19) by no more than 1, 2, 3, 4, 5, 6, or 7 amino acid residues (e.g., a sequence that differs from amino acid residues 236-249 of SEQ ID NO: 19 by no more than 1, 2, 3, 4, 5, 6, or 7 amino acid residues) (e.g., a sequence having no more than 1, 2, 3, 4, 5, 6, or 7 amino acid substitutions from amino acid residues 236-249 of SEQ ID NO: 19).

[0066] In some embodiments, the COF1/CRBN-binding polypeptide comprises amino acid residues 236-249 of IKZF3 (numbered according to SEQ ID NO: 19). In some embodiments, the COF1/CRBN-binding polypeptide comprises the amino acid sequence of SEQ ID NO: 11.

[0067] In some embodiments, the COF1/CRBN-binding polypeptide comprises the amino acid sequence of SEQ ID NO: 91.

[0068] In some embodiments, the COF1/CRBN-binding polypeptide comprises sufficient amino acid sequence and/or a structural motif from amino acid residues 136-180 and 236-249 of IKZF3 (numbered according to SEQ ID NO: 19) (e.g., sufficient amino acid sequence and/or a structural motif from amino acid residues 136-180 and 236-249 of SEQ ID NO: 19) that:
[0069] i) the association of the COF1/CRBN-binding polypeptide with CRBN in the absence of COF1 is no more than, e.g., 0.01%, 0.1%, 1%, 5%, 10%, 15%, or 20%, of the association of the COF1/CRBN-binding polypeptide with CRBN in the presence of COF1, e.g., an excess of COF1, e.g., as measured by an assay described herein, e.g., immunoprecipitation;
[0070] ii) the association of the fusion polypeptide with CRBN in the absence of COF1 is no more than, e.g., 0.01%, 0.1%, 1%, 5%, 10%, 15%, or 20% of the association of the fusion polypeptide with CRBN in the presence of COF1, e.g., an excess of COF1, e.g., as measured by an assay described herein, e.g., immunoprecipitation;
[0071] iii) the ubiquitination of the heterologous polypeptide in the absence of COF1 is no more than, e.g., 0.01%, 0.1%, 1%, 10%, 20%, 30%, 40%, 50%, 60%, or 70%, of the ubiquitination of the heterologous polypeptide in the presence of COF1, e.g., an excess of COF1, e.g., as measured by an assay described herein;
[0072] iv) the ubiquitination of the fusion polypeptide in the absence of COF1 is no more than, e.g., 0.01%, 0.1%, 1%, 10%, 20%, 30%, 40%, 50%, 60%, or 70%, of the ubiquitination of the fusion polypeptide in the presence of COF1, e.g., an excess of COF1, e.g., as measured by an assay described herein; or
[0073] v) the degradation of the fusion polypeptide in the absence of COF1 is no more than, e.g., 0.01%, 0.1%, 1%, 10%, 20%, 30%, 40%, 50%, 60%, or 70%, of the degradation of the fusion polypeptide in the presence of COF1, e.g., an excess of COF1, e.g., as measured by an assay described herein, e.g., a Western blot analysis or a flow cytometry analysis.

[0074] In some embodiments, the association, ubiquitination, and/or degradation is as measured in a mammalian cell, e.g., a human cell.

[0075] In some embodiments, the COF1/CRBN-binding polypeptide comprises a first sequence comprising amino acid residues 136-180 of IKZF3 (numbered according to SEQ ID NO: 19) (e.g., a first sequence comprising the amino acid sequence of SEQ ID NO: 5) or a first sequence that differs from amino acid residues 136-180 of IKZF3 (numbered according to SEQ ID NO: 19) by no more than 1, 2, 3, 4, 5, 10, 15, 20, 25, 30, 35, or 40 amino acid residues (e.g., a first sequence that differs from amino acid residues 136-180 of SEQ ID NO: 19 by no more than 1, 2, 3, 4, 5, 10, 15, 20, 25, 30, 35, or 40 amino acid residues); and a second sequence comprising amino acid residues 236-249 of IKZF3 (numbered according to SEQ ID NO: 19) (e.g., a second sequence comprising the amino acid sequence of SEQ ID NO: 11) or a second sequence that differs from amino acid residues 236-249 of IKZF3 (numbered according to SEQ ID NO: 19) by no more than 1, 2, 3, 4, 5, 6, or 7 amino acid residues (e.g., a second sequence that differs from amino acid residues 236-249 of SEQ ID NO: 19 by no more than 1, 2, 3, 4, 5, 6, or 7 amino acid residues).

[0076] In some embodiments, the COF1/CRBN-binding polypeptide comprises amino acid residues 136-180 and 236-249 of IKZF3 (numbered according to SEQ ID NO: 19). In some embodiments, the COF1/CRBN-binding polypeptide comprises the amino acid sequence of SEQ ID NO: 1. In some embodiments, the COF1/CRBN-binding polypeptide comprises the amino acid sequence of SEQ ID NO: 3. In some embodiments, the COF1/CRBN-binding polypeptide consists of the amino acid sequence of SEQ ID NO: 1. In some embodiments, the COF1/CRBN-binding polypeptide consists of the amino acid sequence of SEQ ID NO: 3.

[0077] In some embodiments, the COF1/CRBN-binding polypeptide comprises a first sequence comprising amino acid residues 136-180 of IKZF3 (numbered according to SEQ ID NO: 19) and a second sequence comprising the amino acid sequence of MALEKMALEKMALE (SEQ ID NO: 91). In some embodiments, the COF1/CRBN-binding polypeptide comprises the amino acid sequence of SEQ ID NO: 14. In some embodiments, the COF1/CRBN-binding polypeptide comprises the amino acid sequence of SEQ ID NO: 85. In some embodiments, the COF1/CRBN-binding polypeptide consists of the amino acid sequence of SEQ ID NO: 14. In some embodiments, the COF1/CRBN-binding polypeptide consists of the amino acid sequence of SEQ ID NO: 85.

[0078] In some embodiments, the COF1/CRBN-binding polypeptide comprises a first sequence comprising amino acid residues 136-170 of IKZF3 (numbered according to SEQ ID NO: 19) and a second sequence comprising the amino acid sequence of MALEKMALEKMALE (SEQ ID NO: 91). In some embodiments, the COF1/CRBN-binding polypeptide comprises the amino acid sequence of SEQ ID NO: 15. In some embodiments, the COF1/CRBN-binding polypeptide comprises the amino acid sequence of SEQ ID NO: 86. In some embodiments, the COF1/CRBN-binding polypeptide consists of the amino acid sequence of SEQ ID NO: 15. In some embodiments, the COF1/CRBN-binding polypeptide consists of the amino acid sequence of SEQ ID NO: 86.

[0079] In some embodiments, the COF1/CRBN-binding polypeptide comprises at least one less lysine than the corresponding native sequence. In some embodiments, one or more lysine residues in the corresponding native sequence are replaced by a different amino acid, e.g., arginine. In some embodiments, the COF1/CRBN-binding polypeptide comprises less than 1, 2, 3, 4, or 5 lysine residues. In some embodiments, the COF1/CRBN-binding polypeptide does not comprise a lysine residue. In some embodiments, the COF1/CRBN-binding polypeptide is not ubiquitinated, e.g., in the presence of COF1, e.g., as measured by an assay described herein, optionally wherein ubiquitination is as measured in a mammalian cell, e.g., a human cell.

[0080] In some embodiments, the COF1/CRBN-binding polypeptide comprises an amino acid sequence selected from the group consisting of SEQ ID NOs: 4, 41, 42, and 43. In some embodiments, the COF1/CRBN-binding polypeptide comprises the amino acid sequence of SEQ ID NO: 4. In some embodiments, the COF1/CRBN-binding polypeptide comprises the amino acid sequence of SEQ ID NO: 41. In some embodiments, the COF1/CRBN-binding polypeptide comprises the amino acid sequence of SEQ ID NO: 42. In some embodiments, the COF1/CRBN-binding polypeptide comprises the amino acid sequence of SEQ ID NO: 43.

[0081] In some embodiments, the COF1/CRBN-binding polypeptide comprises the amino acid sequence of SEQ ID NO: 2. In some embodiments, the COF1/CRBN-binding polypeptide comprises the amino acid sequence of SEQ ID NO: 4. In some embodiments, the COF1/CRBN-binding polypeptide consists of the amino acid sequence of SEQ ID NO: 2. In some embodiments, the COF1/CRBN-binding polypeptide consists of the amino acid sequence of SEQ ID NO: 4.

[0082] In some embodiments, the COF1 is an immunomodulatory imide drug (IMiD), or a pharmaceutically acceptable salt thereof.

[0083] In some embodiments, the COF1 has the structure of Formula (I-a):

[chemical structure]

or a pharmaceutically acceptable salt, ester, hydrate, or tautomer thereof, wherein:
[0084] Ring A is carbocyclyl, heterocyclyl, aryl, or heteroaryl, each of which is independently and optionally substituted with one or more R⁴;
[0085] M is absent, C₁-C₆ alkyl, C₂-C₆ alkenyl, C₂-C₆ alkynyl, or C₁-C₆ heteroalkyl, wherein each alkyl, alkenyl, alkynyl, and heteroalkyl is independently and optionally substituted with one or more R⁴;
[0086] each of R^{2a} and R^{2b} is independently hydrogen or C₁-C₆ alkyl; or R^{2a} and R^{2b} together with the carbon atom to which they are attached to form a carbonyl group or thiocarbonyl group;
[0087] R^{3a} is hydrogen, C₁-C₆ alkyl, C₂-C₆ alkenyl, C₂-C₆ alkynyl, C₁-C₆ heteroalkyl, halo, cyano, —C(O)R^{A}, —C(O)OR^{B}, —OR^{B}, —N(R^{C})(R^{D}), —C(O)N(R^{C})(R^{D}), —N(R^{C})C(O)R^{A}, —S(O)ₓR^{E}, —S(O)ₓN(R^{C})(R^{D}), or —N(R^{C})S(O)ₓR^{E}, wherein each alkyl, alkenyl, alkynyl, and heteroalkyl is independently and optionally substituted with one or more R⁶.
[0088] each of R³ is independently C₁-C₆ alkyl, C₂-C₆ alkenyl, C₂-C₆ alkynyl, C₁-C₆ heteroalkyl, halo, cyano, —C(O)R^{A}, —C(O)OR^{B}, —OR^{B}, —N(R^{C})(R^{D}), —C(O)N(R^{C})(R^{D}), —N(R^{C})C(O)R^{A}, —S(O)ₓR^{E}, —S(O)ₓN(R^{C})(R^{D}), or —N(R^{C})S(O)ₓR^{E}, wherein each alkyl, alkenyl, alkynyl, and heteroalkyl is independently and optionally substituted with one or more R⁶.
[0089] each R⁴ is independently C₁-C₆ alkyl, C₂-C₆ alkenyl, C₂-C₆ alkynyl, C₁-C₆ heteroalkyl, halo, cyano, oxo, —C(O)R^{A}, —C(O)OR^{B}, —OR^{B}, —N(R^{C})(R^{D}), —C(O)N(R^{C})(R^{D}), —N(R^{C})C(O)R^{A}, S(O)_{X}R^{E}, —S(O)ₓN(R^{C})(R^{D}), —N(R^{C})S(O)ₓR^{E}, carbocyclyl, heterocyclyl, aryl, or heteroaryl, wherein each alkyl, alkenyl, alkynyl, carbocyclyl, heterocyclyl, aryl, and heteroaryl is independently and optionally substituted with one or more R⁷;
[0090] each of R^{A}, R^{B}, R^{C}, R^{D}, and R^{E} is independently hydrogen or C₁-C₆ alkyl;
[0091] each R⁶ is independently C₁-C₆ alkyl, oxo, cyano, —OR^{B}, —N(R^{C})(R^{D}), —C(O)N(R^{C})(R^{D}), —N(R^{C})C(O)R^{A}, aryl, or heteroaryl, wherein each aryl and heteroaryl is independently and optionally substituted with one or more R⁸.
[0092] each R⁷ is independently halo, oxo, cyano, —OR^{B}, —N(R^{C})(R^{D}), —C(O)N(R^{C})(R^{D}), or —N(R^{C})C(O)R^{A};
[0093] each R⁸ is independently C₁-C₆ alkyl, cyano, —OR^{B}, —N(R^{C})(R^{D}), —C(O)N(R^{C})(R^{D}), or —N(R^{C})C(O)R^{A};
[0094] n is 0, 1, 2, or 3;
[0095] o is 0, 1, 2, 3, 4, or 5; and
[0096] x is 0, 1, or 2.

[0097] In some embodiments of Formula (I-a), X is O. In some embodiments, M is absent. In some embodiments, Ring A is heterocyclyl (e.g., a nitrogen-containing heterocyclyl, e.g., 2-(2,6-dioxopiperidin-3-yl)isoindoline-1,3-dione). In some embodiments, R⁴ is oxo or OR^{B} (e.g., —OCH₃ or —OCH₂CH₃) and o is 0, 1, or 2. In some embodiments, each of R^{2a} and R^{2b} is independently hydrogen, or R^{2a} and R^{2b} together with the carbon atom to which they are attached form a carbonyl group. In some embodiments, R^{3a} is heteroalkyl (e.g., —CH₂NHC(O)CH₂), —N(R^{C})(R^{D}) (e.g., —NH₂), or —N(R^{C})C(O)R^{A}(e.g., —NHC(O)CH₃). In some embodiments, n is 0.

[0098] In some embodiments, the COF1 is thalidomide or analogue, or a pharmaceutically acceptable salt thereof.

[0099] In some embodiments, the COF1 is selected from the group consisting of lenalidomide, pomalidomide, thalidomide, and 2-(4-(tert-butyl)phenyl)-N-((2-(2,6-dioxopiperidin-3-yl)-1-oxoisoindolin-5-yl)methyl)acetamide, or a pharmaceutically acceptable salt thereof.

[0100] In some embodiments, the COF1 is selected from the group consisting of:

[chemical structure]

or a pharmaceutically acceptable salt thereof.

[0101] In some embodiments, the COF1 is lenalidomide or pomalidomide, or a pharmaceutically acceptable salt thereof. In some embodiments, the COF1 is lenalidomide or analogue, or a pharmaceutically acceptable salt thereof. In some embodiments, the COF1 is lenalidomide, or a pharmaceutically acceptable salt thereof.

[0102] In some embodiments, the fusion polypeptide further comprises a degradation domain, wherein the degradation domain is separated from the COF1/CRBN-binding polypeptide and the heterologous polypeptide by a heterologous protease cleavage site.

[0103] In some embodiments, the fusion polypeptide comprises, from N-terminus to C-terminus: i) the degradation domain, the heterologous protease cleavage site, the heterologous polypeptide, and the COF1/CRBN-binding polypeptide;
[0104] ii) the degradation domain, the heterologous protease cleavage site, the COF1/CRBN-binding polypeptide, and the heterologous polypeptide;
[0105] iii) the COF1/CRBN-binding polypeptide, the heterologous polypeptide, the heterologous protease cleavage site, and the degradation domain; or
[0106] iv) the heterologous polypeptide, and the COF1/CRBN-binding polypeptide, the heterologous protease cleavage site, and the degradation domain.

[0107] In some embodiments, the fusion polypeptide comprises, from N-terminus to C-terminus, the degradation domain, the heterologous protease cleavage site, the heterologous polypeptide, and the COF1/CRBN-binding polypeptide.

[0108] In some embodiments, the degradation domain has a first state associated with a first level of expression of the fusion polypeptide and a second state associated with a second level of expression of the fusion polypeptide, wherein the second level is increased, e.g., by at least 2-, 3-, 4-, 5-, 10-, 20- or 30-fold over the first level in the presence of a stabilization compound.

[0109] In some embodiments, in the absence of the stabilization compound, the fusion polypeptide is degraded by a cellular degradation pathway, e.g., at least 50%, 60%, 70%, 80%, 90% or greater of the fusion polypeptide is degraded, e.g., as measured by an assay described herein, e.g., a Western blot analysis or a flow cytometry analysis.

[0110] In some embodiments, the level of expression, and/or degradation is as measured in a mammalian cell, e.g., a human cell.

[0111] In some embodiments, in the presence of the stabilization compound:
[0112] i) the degradation domain assumes a conformation more resistant to cellular degradation relative to a conformation in the absence of the stabilization compound; or
[0113] ii) the conformation of the fusion polypeptide is more permissive to cleavage at the heterologous protease cleavage site relative to a conformation in the absence of the stabilization compound.

[0114] In some embodiments, the degradation domain is chosen from an estrogen receptor (ER) domain, an FKB protein (FKBP) domain, or a dihydrofolate reductase (DHFR) domain.

[0115] In some embodiments, the degradation domain is an estrogen receptor (ER) domain. In some embodiments, the degradation domain comprises an amino acid sequence that is at least 90, 95, 97, 98, 99, or 100% identical to SEQ ID NO: 46 or 48. In some embodiments, the degradation domain comprises the amino acid sequence of SEQ ID NO: 46. In some embodiments, the degradation domain comprises the amino acid sequence of SEQ ID NO: 48.

[0116] In some embodiments, the stabilization compound is bazedoxifene or 4-hydroxy tamoxifen (4-OHT), or a pharmaceutically acceptable salt thereof. In some embodiments, the degradation domain is an estrogen receptor (ER) domain and the stabilization compound is bazedoxifene, or a pharmaceutically acceptable salt thereof. In some embodiments, the degradation domain comprises the amino acid sequence of SEQ ID NO: 46 and the stabilization compound is bazedoxifene, or a pharmaceutically acceptable salt thereof.

[0117] In some embodiments, the degradation domain is an FKB protein (FKBP) domain. In some embodiments, the degradation domain comprises an amino acid sequence that is at least 90, 95, 97, 98, 99, or 100% identical to SEQ ID NO: 50. In some embodiments, the degradation domain comprises the amino acid sequence of SEQ ID NO: 50. In some embodiments, the stabilization compound is Shield-1, or a pharmaceutically acceptable salt thereof.

[0118] In some embodiments, the degradation domain is a dihydrofolate reductase (DHFR) domain. In some embodiments, the degradation domain comprises an amino acid sequence that is at least 90, 95, 97, 98, 99, or 100% identical to SEQ ID NO: 51. In some embodiments, the degradation domain comprises the amino acid sequence of SEQ ID NO: 51. In some embodiments, the stabilization compound is trimethoprim, or a pharmaceutically acceptable salt thereof.

[0119] In some embodiments, the heterologous protease cleavage site is cleaved by a mammalian intracellular protease. In some embodiments, the heterologous protease cleavage site is cleaved by a protease selected from the group consisting of furin, PCSK1, PCSK5, PCSK6, PCSK7, cathepsin B, Granzyme B, Factor XA, Enterokinase, genenase, sortase, precission protease, thrombin, TEV protease, and elastase 1. In some embodiments, the heterologous protease cleavage site comprises a sequence having a cleavage motif selected from the group consisting of RX(K/R)R consensus motif (X can be any amino acid; SEQ ID NO: 52), RXXX[KR]R consensus motif (X can be any amino acid; SEQ ID NO: 53), RRX consensus motif (SEQ ID NO: 54), I-E-P-D-X consensus motif (SEQ ID NO: 55), Ile-Glu/Asp-Gly-Arg (SEQ ID NO: 56), Asp-Asp-Asp-Asp-Lys (SEQ ID NO: 57), Pro-Gly-Ala-Ala-His-Tyr (SEQ ID NO: 58), LPXTG/A consensus motif (SEQ ID NO: 59), Leu-Glu-Val-Phe-Gln-Gly-Pro (SEQ ID NO: 60), Leu-Val-Pro-Arg-Gly-Ser (SEQ ID NO: 61), E-N-L-Y-F-Q-G (SEQ ID NO: 62), and [AGSV]-X (X can be any amino acid; SEQ ID NO: 63). In some embodiments, the heterologous protease cleavage site is cleaved by furin. In some embodiments, the heterologous protease cleavage site comprises a furin cleavage site selected from the group consisting of RTKR (SEQ ID NO: 123); GTGAEDPRPSRKRRSLGDVG (SEQ ID NO: 125); GTGAEDPRPSRKRR (SEQ ID NO: 127); LQWLEQQVAKRRTKR (SEQ ID NO: 129); GTGAEDPRPSRKRRSLGG (SEQ ID NO: 131); GTGAEDPRPSRKRRSLG (SEQ ID NO: 133); SLNLTESHNSRKKR (SEQ ID NO: 135); CKINGYPKRGRKRR (SEQ ID NO: 137); and SARNRQKR (SEQ ID NO: 34). In some embodiments, the heterologous protease cleavage site does not comprise the amino acid sequence of SARNRQKR (SEQ ID NO: 34). In some embodiments, the heterologous protease cleavage site comprises the furin cleavage site of GTGAEDPRPSRKRRSLGDVG (SEQ ID NO: 125). In some embodiments, the heterologous protease cleavage site is cleaved by a mammalian extracellular protease. In some embodiments, the mammalian extracellular protease is selected from the group consisting of Factor XA, Enterokinase, genenase, sortase, precission protease, thrombin, TEV protease, and elastase 1. In some embodiments, the heterologous protease cleavage site comprises an amino acid sequence selected from the group consisting of Ile-Glu/Asp-Gly-Arg (SEQ ID NO: 56), Asp-Asp-Asp-Asp-Lys (SEQ ID NO: 57), Pro-Gly-Ala-Ala-His-Tyr (SEQ ID NO: 58), LPXTG/A consensus motif (SEQ ID NO: 59), Leu-Glu-Val-Phe-Gln-Gly-Pro (SEQ ID NO: 60), Leu-Val-Pro-Arg-Gly-Ser (SEQ ID NO: 61), E-N-L-Y-F-Q-G (SEQ ID NO: 62), and [AGSV]-X (X can be any amino acid; SEQ ID NO: 63).

[0120] In one aspect, provided herein is a fusion polypeptide comprising a first domain and a second domain separated by a heterologous protease cleavage site, wherein the first domain comprises a degradation domain and the second domain comprises a compound of Formula (II) (COF2)/CRBN-binding polypeptide and a heterologous polypeptide, e.g., a heterologous mammalian, bacterial, or viral polypeptide, wherein the compound of Formula (II) is:

[chemical structure]

or a pharmaceutically acceptable salt, ester, hydrate, tautomer, or prodrug thereof, wherein:
[0121] X is O or S;
[0122] R¹ is C₁-C₆ alkyl, C₂-C₆ alkenyl, C₂-C₆ alkynyl, C₁-C₆ heteroalkyl, carbocyclyl, heterocyclyl, aryl, or heteroaryl, each of which is independently and optionally substituted by one or more R⁴;
[0123] each of R^{2a} and R^{2b} is independently hydrogen or C₁-C₆ alkyl; or R^{2a} and R^{2b} together with the carbon atom to which they are attached to form carbonyl group or thiocarbonyl group;
[0124] each of R¹⁰ is independently C₁-C₆ alkyl, C₂-C₆ alkenyl, C₂-C₆ alkynyl, C₁-C₆ heteroalkyl, halo, cyano, —C(O)R^{A}, —C(O)OR^{B}, —OR^{B}, —N(R^{C})(R^{D}), —C(O)N(R^{C})(R^{D}), —N(R^{C})C(O)R^{A}, —S(O)ₓR^{E}, —S(O)ₓN(R^{C})(R^{D}), or —N(R^{C})S(O)ₓR^{E}, or L-Tag; wherein each alkyl, alkenyl, alkynyl, and heteroalkyl is independently and optionally substituted with one or more R¹¹;
[0125] each R⁴ is independently C₁-C₆ alkyl, C₂-C₆ alkenyl, C₂-C₆ alkynyl, C₁-C₆ heteroalkyl, halo, cyano, oxo, C(O)R^{A}, —C(O)OR^{B}, OR^{B}, —N(R^{C})(R^{D}), —C(O)N(R^{C})(R^{D}), —N(R^{C})C(O)R^{A}, S(O)_{X}R^{E}, —S(O)ₓN(R^{C})(R^{D}), —N(R^{C})S(O)ₓR^{E}, carbocyclyl, heterocyclyl, aryl, or heteroaryl, wherein each alkyl, alkenyl, alkynyl, heteroalkyl, carbocyclyl, heterocyclyl, aryl, and heteroaryl is independently and optionally substituted with one or more R⁷;
[0126] each of R^{A}, R^{B}, R^{C}, R^{D}, and R^{E} is independently hydrogen or C₁-C₆ alkyl;
[0127] each R¹¹ is independently C₁-C₆ alkyl, halo, oxo, cyano, —OR^{B}, —N(R^{C})(R^{D}), —C(O)N(R^{C})(R^{D}), —N(R^{C})C(O)R^{A}, aryl, or heteroaryl, wherein each aryl and heteroaryl is independently and optionally substituted with one or more R⁸;
[0128] each R⁷ is independently halo, oxo, cyano, —OR^{B}, —N(R^{C})(R^{D}), —C(O)N(R^{C})(R^{D}), or —N(R^{C})C(O)R^{A};
[0129] each R⁸ is independently C₁-C₆ alkyl, halo, cyano, —OR^{B}, —N(R^{C})(R^{D}), —C(O)N(R^{C})(R^{D}), or —N(R^{C})C(O)R^{A};
[0130] each L is independently C₁-C₆ alkyl, C₂-C₆ alkenyl, C₂-C₆ alkynyl, C₁-C₆ heteroalkyl, —C(O)R^{A1}, —C(O)OR^{B1}, —OR^{B1}, —N(R^{C1})(R^{D1}), —C(O)N(R^{C1})(R^{D1}), —N(R^{C1})C(O)R^{A1}, —S(O)ₓR^{E1}, —S(O)ₓN(R^{C1})(R^{D1}) or —N (R^{C1})S(O)ₓR^{E1}, wherein each alkyl, alkenyl, alkynyl, and heteroalkyl is independently and optionally substituted with one or more R¹²
[0131] each Tag is a targeting moiety capable of binding to a target protein;
[0132] each of R^{A1}, R^{B1}, R^{C1}, R^{D1}, and R^{E1} is independently hydrogen, C₁-C₆ alkyl, C₂-C₆ alkenyl, C₂-C₆ alkynyl, C₁-C₆ heteroalkyl, carbocyclyl, heterocyclyl, aryl, or heteroaryl, wherein each alkyl, alkenyl, alkynyl, heteroalkyl, carbocyclyl, heterocyclyl, aryl, and heteroaryl is independently and optionally substituted with one or more R¹²;
[0133] each R¹² is independently C₁-C₆ alkyl, halo, cyano, carbocyclyl, or heterocyclyl;
[0134] n is 0, 1, 2, 3 or 4; and
[0135] x is 0, 1, or 2.

[0136] In some embodiments, the degradation domain has a first state associated with a first level of expression of the fusion polypeptide and a second state associated with a second level of expression of the fusion polypeptide, wherein the second level is increased, e.g., by at least 2-, 3-, 4-, 5-, 10-, 20- or 30-fold over the first level in the presence of a stabilization compound.

[0137] In some embodiments, in the absence of the stabilization compound, the fusion polypeptide is degraded by a cellular degradation pathway, e.g., at least 50%, 60%, 70%, 80%, 90% or greater of the fusion polypeptide is degraded, e.g., as measured by an assay described herein, e.g., a Western blot analysis or a flow cytometry analysis.

[0138] In some embodiments, the level of expression, and/or degradation is as measured in a mammalian cell, e.g., a human cell.

[0139] In some embodiments, in the presence of the stabilization compound:
[0140] i) the degradation domain assumes a conformation more resistant to cellular degradation relative to a conformation in the absence of the stabilization compound; or
[0141] ii) the conformation of the fusion polypeptide is more permissive to cleavage at the heterologous protease cleavage site relative to a conformation in the absence of the stabilization compound.

[0142] In some embodiments, the degradation domain is chosen from an estrogen receptor (ER) domain, an FKB protein (FKBP) domain, or a dihydrofolate reductase (DHFR) domain.

[0143] In some embodiments, the degradation domain is an estrogen receptor (ER) domain. In some embodiments, the degradation domain comprises an amino acid sequence that is at least 90, 95, 97, 98, 99, or 100% identical to SEQ ID NO: 46 or 48. In some embodiments, the degradation domain comprises the amino acid sequence of SEQ ID NO: 46. In some embodiments, the degradation domain comprises the amino acid sequence of SEQ ID NO: 48.

[0144] In some embodiments, the stabilization compound is bazedoxifene or 4-hydroxy tamoxifen (4-OHT), or a pharmaceutically acceptable salt thereof. In some embodiments, the degradation domain is an estrogen receptor (ER) domain and the stabilization compound is bazedoxifene, or a pharmaceutically acceptable salt thereof. In some embodiments, the degradation domain comprises the amino acid sequence of SEQ ID NO: 46 and the stabilization compound is bazedoxifene, or a pharmaceutically acceptable salt thereof.

[0145] In some embodiments, the degradation domain is an FKB protein (FKBP) domain. In some embodiments, the degradation domain comprises an amino acid sequence that is at least 90, 95, 97, 98, 99, or 100% identical to SEQ ID NO: 50. In some embodiments, the degradation domain comprises the amino acid sequence of SEQ ID NO: 50. In some embodiments, the stabilization compound is Shield-1, or a pharmaceutically acceptable salt thereof.

[0146] In some embodiments, the degradation domain is a dihydrofolate reductase (DHFR) domain. In some embodiments, the degradation domain comprises an amino acid sequence that is at least 90, 95, 97, 98, 99, or 100% identical to SEQ ID NO: 51. In some embodiments, the degradation domain comprises the amino acid sequence of SEQ ID NO: 51. In some embodiments, the stabilization compound is trimethoprim, or a pharmaceutically acceptable salt thereof.

[0147] In some embodiments, the heterologous protease cleavage site is cleaved by a mammalian intracellular protease. In some embodiments, the heterologous protease cleavage site is cleaved by a protease selected from the group consisting of furin, PCSK1, PCSK5, PCSK6, PCSK7, cathepsin B, Granzyme B, Factor XA, Enterokinase, genenase, sortase, precission protease, thrombin, TEV protease, and elastase 1. In some embodiments, the heterologous protease cleavage site comprises a sequence having a cleavage motif selected from the group consisting of RX(K/R)R consensus motif (X can be any amino acid; SEQ ID NO: 52), RXXX[KR]R consensus motif (X can be any amino acid; SEQ ID NO: 53), RRX consensus motif (SEQ ID NO: 54), I-E-P-D-X consensus motif (SEQ ID NO: 55), Ile-Glu/Asp-Gly-Arg (SEQ ID NO: 56), Asp-Asp-Asp-Asp-Lys (SEQ ID NO: 57), Pro-Gly-Ala-Ala-His-Tyr (SEQ ID NO: 58), LPXTG/A consensus motif (SEQ ID NO: 59), Leu-Glu-Val-Phe-Gln-Gly-Pro (SEQ ID NO: 60), Leu-Val-Pro-Arg-Gly-Ser (SEQ ID NO: 61), E-N-L-Y-F-Q-G (SEQ ID NO: 62), and [AGSV]-X (X can be any amino acid; SEQ ID NO: 63). In some embodiments, the heterologous protease cleavage site is cleaved by furin. In some embodiments, the heterologous protease cleavage site comprises a furin cleavage site selected from the group consisting of RTKR (SEQ ID NO: 123); GTGAEDPRPSRKRRSLGDVG (SEQ ID NO: 125); GTGAEDPRPSRKRR (SEQ ID NO: 127); LQWLEQQVAKRRTKR (SEQ ID NO: 129); GTGAEDPRPSRKRRSLGG (SEQ ID NO: 131); GTGAEDPRPSRKRRSLG (SEQ ID NO: 133); SLNLTESHNSRKKR (SEQ ID NO: 135); CKINGYPKRGRKRR (SEQ ID NO: 137); and SARNRQKR (SEQ ID NO: 34). In some embodiments, the heterologous protease cleavage site does not comprise the amino acid sequence of SARNRQKR (SEQ ID NO: 34). In some embodiments, the heterologous protease cleavage site comprises the furin cleavage site of GTGAEDPRPSRKRRSLGDVG (SEQ ID NO: 125). In some embodiments, the heterologous protease cleavage site is cleaved by a mammalian extracellular protease. In some embodiments, the mammalian extracellular protease is selected from the group consisting of Factor XA, Enterokinase, genenase, sortase, precission protease, thrombin, TEV protease, and elastase 1. In some embodiments, the heterologous protease cleavage site comprises an amino acid sequence selected from the group consisting of Ile-Glu/Asp-Gly-Arg (SEQ ID NO: 56), Asp-Asp-Asp-Asp-Lys (SEQ ID NO: 57), Pro-Gly-Ala-Ala-His-Tyr (SEQ ID NO: 58), LPXTG/A consensus motif (SEQ ID NO: 59), Leu-Glu-Val-Phe-Gln-Gly-Pro (SEQ ID NO: 60), Leu-Val-Pro-Arg-Gly-Ser (SEQ ID NO: 61), E-N-L-Y-F-Q-G (SEQ ID NO: 62), and [AGSV]-X (X can be any amino acid; SEQ ID NO: 63).

[0148] In some embodiments, the degradation domain is fused to the heterologous protease cleavage site, which is further fused to the second domain.

[0149] In some embodiments, the fusion polypeptide comprises, from N-terminus to C-terminus:
[0150] i) the degradation domain, the heterologous protease cleavage site, the heterologous polypeptide, and the COF2/CRBN-binding polypeptide;
[0151] ii) the degradation domain, the heterologous protease cleavage site, the COF2/CRBN-binding polypeptide, and the heterologous polypeptide;
[0152] iii) the COF2/CRBN-binding polypeptide, the heterologous polypeptide, the heterologous protease cleavage site, and the degradation domain; or
[0153] iv) the heterologous polypeptide, and the COF2/CRBN-binding polypeptide, the heterologous protease cleavage site, and the degradation domain.

[0154] In some embodiments, the fusion polypeptide comprises, from N-terminus to C-terminus, the degradation domain, the heterologous protease cleavage site, the heterologous polypeptide, and the COF2/CRBN-binding polypeptide. In some embodiments, the fusion polypeptide comprises, from N-terminus to C-terminus, the degradation domain, the heterologous protease cleavage site, the COF2/CRBN-binding polypeptide, and the heterologous polypeptide. In some embodiments, the fusion polypeptide comprises, from N-terminus to C-terminus, the COF2/CRBN-binding polypeptide, the heterologous polypeptide, the heterologous protease cleavage site, and the degradation domain. In some embodiments, the fusion polypeptide comprises, from N-terminus to C-terminus, the heterologous polypeptide, and the COF2/CRBN-binding polypeptide, the heterologous protease cleavage site, and the degradation domain.

[0155] In some embodiments, the association of the COF2/CRBN-binding polypeptide with cereblon (CRBN) in the absence of COF2 is no more than, e.g., 0.01%, 0.1%, 1%, 5%, 10%, 15%, or 20%, of the association of the COF2/CRBN-binding polypeptide with CRBN in the presence of COF2, e.g., an excess of COF2, e.g., as measured by an assay described herein, e.g., immunoprecipitation. In some embodiments, the COF2/CRBN-binding polypeptide does not bind to CRBN in the absence of COF2. In some embodiments, the association of the fusion polypeptide with CRBN in the absence of COF2 is no more than, e.g., 0.01%, 0.1%, 1%, 5%, 10%, 15%, or 20%, of the association of the fusion polypeptide with CRBN in the presence of COF2, e.g., an excess of COF2, e.g., as measured by an assay described herein, e.g., immunoprecipitation. In some embodiments, the fusion polypeptide does not bind to CRBN in the absence of COF2. In some embodiments, the association and/or binding is as measured in a mammalian cell, e.g., a human cell.

[0156] In some embodiments, the ubiquitination of the heterologous polypeptide in the absence of COF2 is no more than, e.g., 0.01%, 0.1%, 1%, 10%, 20%, 30%, 40%, 50%, 60%, or 70%, of the ubiquitination of the heterologous polypeptide in the presence of COF2, e.g., an excess of COF2, e.g., as measured by an assay described herein. In some embodiments, the ubiquitination of the fusion polypeptide in the absence of COF2 is no more than, e.g., 0.01%, 0.1%, 1%, 10%, 20%, 30%, 40%, 50%, 60%, or 70%, of the ubiquitination of the fusion polypeptide in the presence of COF2, e.g., an excess of COF2, e.g., as measured by an assay described herein. In some embodiments, the heterologous polypeptide or the fusion polypeptide is ubiquitinated at one or more lysine or methionine residues in the presence of COF2. In some embodiments, the ubiquitination is as measured in a mammalian cell, e.g., a human cell. In some embodiments, the degradation of the fusion polypeptide in the absence of COF2 is no more than, e.g., 0.01%, 0.1%, 1%, 10%, 20%, 30%, 40%, 50%, 60%, or 70%, of the degradation of the fusion polypeptide in the presence of COF2, e.g., an excess of COF2, e.g., as measured by an assay described herein, e.g., a Western blot analysis or a flow cytometry analysis. In some embodiments, the degradation of the fusion polypeptide is mediated by ubiquitination in the presence of COF2. In some embodiments, the degradation is as measured in a mammalian cell, e.g., a human cell.

[0157] In some embodiments, the COF2/CRBN-binding polypeptide is between 10 and 95 amino acid residues in length, between 15 and 90 amino acid residues in length, between 20 and 85 amino acid residues in length, between 25 and 80 amino acid residues in length, between 30 and 75 amino acid residues in length, between 35 and 70 amino acid residues in length, between 40 and 65 amino acid residues in length, between 45 and 65 amino acid residues in length, between 50 and 65 amino acid residues in length, or between 55 and 65 amino acid residues in length.

[0158] In some embodiments, the COF2/CRBN-binding polypeptide comprises a beta turn. In some embodiments, the COF2/CRBN-binding polypeptide comprises a beta turn of IKZF1 or IKZF3 (e.g., human IKZF1 or IKZF3). In some embodiments, the COF2/CRBN-binding polypeptide comprises a beta hairpin. In some embodiments, the COF2/CRBN-binding polypeptide comprises a beta hairpin of IKZF1 or IKZF3 (e.g., human IKZF1 or IKZF3). In some embodiments, the COF2/CRBN-binding polypeptide comprises a beta strand. In some embodiments, the COF2/CRBN-binding polypeptide comprises a beta strand of IKZF1 or IKZF3 (e.g., human IKZF1 or IKZF3). In some embodiments, the COF2/CRBN-binding polypeptide comprises an alpha helix. In some embodiments, the COF2/CRBN-binding polypeptide comprises an alpha helix of IKZF1 or IKZF3 (e.g., human IKZF1 or IKZF3). In some embodiments, the COF2/CRBN-binding polypeptide comprises, from N-terminus to C-terminus, a first beta strand, a beta hairpin, a second beta strand, and a first alpha helix. In some embodiments, the COF2/CRBN-binding polypeptide comprises, from N-terminus to C-terminus, a first beta strand, a beta hairpin, a second beta strand, and a first alpha helix of IKZF1 or IKZF3 (e.g., human IKZF1 or IKZF3). In some embodiments, the COF2/CRBN-binding polypeptide comprises, from N-terminus to C-terminus, a first beta strand, a beta hairpin, a second beta strand, a first alpha helix, and a second alpha helix. In some embodiments, the COF2/CRBN-binding polypeptide comprises, from N-terminus to C-terminus, a first beta strand, a beta hairpin, a second beta strand, a first alpha helix, and a second alpha helix of IKZF1 or IKZF3 (e.g., human IKZF1 or IKZF3). In some embodiments, the beta hairpin and the second alpha helix are separated by no more than 60, 50, 40, or 30 amino acid residues.

[0159] In some embodiments, the COF2/CRBN-binding polypeptide comprises a COF2/CRBN-binding sequence from a naturally occurring polypeptide or a COF2/CRBN-binding variant thereof. In some embodiments, the COF2/CRBN-binding polypeptide comprises a COF2/CRBN-binding sequence from a naturally occurring IKZF polypeptide or a COF2/CRBN-binding variant thereof. In some embodiments, the COF2/CRBN-binding polypeptide comprises a COF2/CRBN-binding sequence from a naturally occurring IKZF1, IKZF2, IKZF3, IKZF4, or IKZF5, or a COF2/CRBN-binding variant thereof. In some embodiments, the COF2/CRBN-binding sequence comprises two or more discontinuous sequences from the naturally occurring polypeptide, e.g., a naturally occurring IKZF polypeptide, e.g., a naturally occurring IKZF1, IKZF2, IKZF3, IKZF4, or IKZF5.

[0160] In some embodiments, the COF2/CRBN-binding polypeptide comprises an IKZF polypeptide or a structural motif thereof.

[0161] In some embodiments, the IKZF polypeptide is an IKZF1 polypeptide, an IKZF3 polypeptide, an IKZF2 polypeptide having H141Q substitution (numbered according to SEQ ID NO: 21), or an IKZF4 polypeptide having H188Q substitution (numbered according to SEQ ID NO: 22).

[0162] In some embodiments, the COF2/CRBN-binding polypeptide comprises sufficient amino acid sequence and/or a structural motif from IKZF (e.g., IKZF1 or IKZF3) that:
[0163] i) the association of the COF2/CRBN-binding polypeptide with CRBN in the absence of COF2 is no more than, e.g., 0.01%, 0.1%, 1%, 5%, 10%, 15%, or 20%, of the association of the COF2/CRBN-binding polypeptide with CRBN in the presence of COF2, e.g., an excess of COF2, e.g., as measured by an assay described herein, e.g., immunoprecipitation;
[0164] ii) the association of the fusion polypeptide with CRBN in the absence of COF2 is no more than, e.g., 0.01%, 0.1%, 1%, 5%, 10%, 15%, or 20% of the association of the fusion polypeptide with CRBN in the presence of COF2, e.g., an excess of COF2, e.g., as measured by an assay described herein, e.g., immunoprecipitation;
[0165] iii) the ubiquitination of the heterologous polypeptide in the absence of COF2 is no more than, e.g., 0.01%, 0.1%, 1%, 10%, 20%, 30%, 40%, 50%, 60%, or 70%, of the ubiquitination of the heterologous polypeptide in the presence of COF2, e.g., an excess of COF2, e.g., as measured by an assay described herein;
[0166] iv) the ubiquitination of the fusion polypeptide in the absence of COF2 is no more than, e.g., 0.01%, 0.1%, 1%, 10%, 20%, 30%, 40%, 50%, 60%, or 70%, of the ubiquitination of the fusion polypeptide in the presence of COF2, e.g., an excess of COF2, e.g., as measured by an assay described herein; or
[0167] v) the degradation of the fusion polypeptide in the absence of COF2 is no more than, e.g., 0.01%, 0.1%, 1%, 10%, 20%, 30%, 40%, 50%, 60%, or 70%, of the degradation of the fusion polypeptide in the presence of COF2, e.g., an excess of COF2, e.g., as measured by an assay described herein, e.g., a Western blot analysis or a flow cytometry analysis.

[0168] In some embodiments, the association, ubiquitination, and/or degradation is as measured in a mammalian cell, e.g., a human cell.

[0169] In some embodiments, the COF2/CRBN-binding polypeptide comprises about 10 to about 95 amino acid residues, about 15 to about 90 amino acid residues, about 20 to about 85 amino acid residues, about 25 to about 80 amino acid residues, about 30 to about 75 amino acid residues, about 35 to about 70 amino acid residues, about 40 to about 65 amino acid residues, about 45 to about 65 amino acid residues, about 50 to about 65 amino acid residues, or about 55 to about 65 amino acid residues of IKZF1 or IKZF3.

[0170] In some embodiments, the COF2/CRBN-binding polypeptide comprises sufficient amino acid sequence and/or a structural motif from amino acid residues 136-180 of IKZF3 (numbered according to SEQ ID NO: 19) (e.g., sufficient amino acid sequence and/or a structural motif from amino acid residues 136-180 of SEQ ID NO: 19) that:
[0171] i) the association of the COF2/CRBN-binding polypeptide with CRBN in the absence of COF2 is no more than, e.g., 0.01%, 0.1%, 1%, 5%, 10%, 15%, or 20%, of the association of the COF2/CRBN-binding polypeptide with CRBN in the presence of COF2, e.g., an excess of COF2, e.g., as measured by an assay described herein, e.g., immunoprecipitation;
[0172] ii) the association of the fusion polypeptide with CRBN in the absence of COF2 is no more than, e.g., 0.01%, 0.1%, 1%, 5%, 10%, 15%, or 20% of the association of the fusion polypeptide with CRBN in the presence of COF2, e.g., an excess of COF2, e.g., as measured by an assay described herein, e.g., immunoprecipitation;
[0173] iii) the ubiquitination of the heterologous polypeptide in the absence of COF2 is no more than, e.g., 0.01%, 0.1%, 1%, 10%, 20%, 30%, 40%, 50%, 60%, or 70%, of the ubiquitination of the heterologous polypeptide in the presence of COF2, e.g., an excess of COF2, e.g., as measured by an assay described herein;
[0174] iv) the ubiquitination of the fusion polypeptide in the absence of COF2 is no more than, e.g., 0.01%, 0.1%, 1%, 10%, 20%, 30%, 40%, 50%, 60%, or 70%, of the ubiquitination of the fusion polypeptide in the presence of COF2, e.g., an excess of COF2, e.g., as measured by an assay described herein; or
[0175] v) the degradation of the fusion polypeptide in the absence of COF2 is no more than, e.g., 0.01%, 0.1%, 1%, 10%, 20%, 30%, 40%, 50%, 60%, or 70%, of the degradation of the fusion polypeptide in the presence of COF2, e.g., an excess of COF2, e.g., as measured by an assay described herein, e.g., a Western blot analysis or a flow cytometry analysis.

[0176] In some embodiments, the association, ubiquitination, and/or degradation is as measured in a mammalian cell, e.g., a human cell.

[0177] In some embodiments, the COF2/CRBN-binding polypeptide comprises amino acid residues 136-180 of IKZF3 (numbered according to SEQ ID NO: 19) (e.g., the COF2/CRBN-binding polypeptide comprises the amino acid sequence of SEQ ID NO: 5) or a sequence that differs from amino acid residues 136-180 of IKZF3 (numbered according to SEQ ID NO: 19) by no more than 1, 2, 3, 4, 5, 10, 15, 20, 25, 30, 35, or 40 amino acid residues (e.g., a sequence that differs from amino acid residues 136-180 of SEQ ID NO: 19 by no more than 1, 2, 3, 4, 5, 10, 15, 20, 25, 30, 35, or 40 amino acid residues) (e.g., a sequence having no more than 1, 2, 3, 4, 5, 10, 15, 20, 25, 30, 35, or 40 amino acid substitutions from amino acid residues 136-180 of SEQ ID NO: 19).

[0178] In some embodiments, the COF2/CRBN-binding polypeptide comprises sufficient amino acid sequence and/or a structural motif from amino acid residues 136-170 of IKZF3 (numbered according to SEQ ID NO: 19) (e.g., sufficient amino acid sequence and/or a structural motif from amino acid residues 136-170 of SEQ ID NO: 19) that:
[0179] i) the association of the COF2/CRBN-binding polypeptide with CRBN in the absence of COF2 is no more than, e.g., 0.01%, 0.1%, 1%, 5%, 10%, 15%, or 20%, of the association of the COF2/CRBN-binding polypeptide with CRBN in the presence of COF2, e.g., an excess of COF2, e.g., as measured by an assay described herein, e.g., immunoprecipitation;
[0180] ii) the association of the fusion polypeptide with CRBN in the absence of COF2 is no more than, e.g., 0.01%, 0.1%, 1%, 5%, 10%, 15%, or 20% of the association of the fusion polypeptide with CRBN in the presence of COF2, e.g., an excess of COF2, e.g., as measured by an assay described herein, e.g., immunoprecipitation;
[0181] iii) the ubiquitination of the heterologous polypeptide in the absence of COF2 is no more than, e.g., 0.01%, 0.1%, 1%, 10%, 20%, 30%, 40%, 50%, 60%, or 70%, of the ubiquitination of the heterologous polypeptide in the presence of COF2, e.g., an excess of COF2, e.g., as measured by an assay described herein;
[0182] iv) the ubiquitination of the fusion polypeptide in the absence of COF2 is no more than, e.g., 0.01%, 0.1%, 1%, 10%, 20%, 30%, 40%, 50%, 60%, or 70%, of the ubiquitination of the fusion polypeptide in the presence of COF2, e.g., an excess of COF2, e.g., as measured by an assay described herein; or
[0183] v) the degradation of the fusion polypeptide in the absence of COF2 is no more than, e.g., 0.01%, 0.1%, 1%, 10%, 20%, 30%, 40%, 50%, 60%, or 70%, of the degradation of the fusion polypeptide in the presence of COF2, e.g., an excess of COF2, e.g., as measured by an assay described herein, e.g., a Western blot analysis or a flow cytometry analysis.

[0184] In some embodiments, the association, ubiquitination, and/or degradation is as measured in a mammalian cell, e.g., a human cell.

[0185] In some embodiments, the COF2/CRBN-binding polypeptide comprises amino acid residues 136-170 of IKZF3 (numbered according to SEQ ID NO: 19) (e.g., the COF2/CRBN-binding polypeptide comprises the amino acid sequence of SEQ ID NO: 6) or a sequence that differs from amino acid residues 136-170 of IKZF3 (numbered according to SEQ ID NO: 19) by no more than 1, 2, 3, 4, 5, 10, 15, 20, 25, or 30 amino acid residues (e.g., a sequence that differs from amino acid residues 136-170 of SEQ ID NO: 19 by no more than 1, 2, 3, 4, 5, 10, 15, 20, 25, or 30 amino acid residues) (e.g., a sequence having no more than 1, 2, 3, 4, 5, 10, 15, 20, 25, or 30 amino acid substitutions from amino acid residues 136-170 of SEQ ID NO: 19).

[0186] In some embodiments, one, two, three or all of the following amino acid residues remain unaltered: glutamine at position 147, cysteine at position 148, glutamine at position 150, glycine at position 152, leucine at position 161, or leucine at position 162, numbered according to SEQ ID NO: 19. In some embodiments, glutamine at position 147 remains unaltered, numbered according to SEQ ID NO: 19. In some embodiments, cysteine at position 148 remains unaltered, numbered according to SEQ ID NO: 19. In some embodiments, glutamine at position 150 remains unaltered, numbered according to SEQ ID NO: 19. In some embodiments, glycine at position 152 remains unaltered, numbered according to SEQ ID NO: 19. In some embodiments, leucine at position 161 remains unaltered, numbered according to SEQ ID NO: 19. In some embodiments, leucine at position 162 remains unaltered, numbered according to SEQ ID NO: 19.

[0187] In some embodiments, the COF2/CRBN-binding polypeptide comprises amino acid residues 136-139 of IKZF3 (numbered according to SEQ ID NO: 19), e.g., the COF2/CRBN-binding polypeptide comprises the amino acid sequence of SEQ ID NO: 40.

[0188] In some embodiments, the COF2/CRBN-binding polypeptide comprises amino acid residues 136-180 of IKZF3 (numbered according to SEQ ID NO: 19). In some embodiments, the COF2/CRBN-binding polypeptide comprises the amino acid sequence of SEQ ID NO: 5. In some embodiments, the COF2/CRBN-binding polypeptide comprises the amino acid sequence of SEQ ID NO: 77. In some embodiments, the COF2/CRBN-binding polypeptide consists of the amino acid sequence of SEQ ID NO: 5. In some embodiments, the COF2/CRBN-binding polypeptide consists of the amino acid sequence of SEQ ID NO: 5.

[0189] In some embodiments, the COF2/CRBN-binding polypeptide comprises amino acid residues 136-170 of IKZF3 (numbered according to SEQ ID NO: 19). In some embodiments, the COF2/CRBN-binding polypeptide comprises the amino acid sequence of SEQ ID NO: 6. n some embodiments, the COF2/CRBN-binding polypeptide comprises the amino acid sequence of SEQ ID NO: 78. In some embodiments, the COF2/CRBN-binding polypeptide consists of the amino acid sequence of SEQ ID NO: 6. In some embodiments, the COF2/CRBN-binding polypeptide consists of the amino acid sequence of SEQ ID NO: 78.

[0190] In some embodiments, the COF2/CRBN-binding polypeptide comprises sufficient amino acid sequence and/or a structural motif from amino acid residues 236-249 of IKZF3 (numbered according to SEQ ID NO: 19) (e.g., sufficient amino acid sequence and/or a structural motif from amino acid residues 236-249 of SEQ ID NO: 19) that:
[0191] i) the association of the COF2/CRBN-binding polypeptide with CRBN in the absence of COF2 is no more than, e.g., 0.01%, 0.1%, 1%, 5%, 10%, 15%, or 20%, of the association of the COF2/CRBN-binding polypeptide with CRBN in the presence of COF2, e.g., an excess of COF2, e.g., as measured by an assay described herein, e.g., immunoprecipitation;
[0192] ii) the association of the fusion polypeptide with CRBN in the absence of COF2 is no more than, e.g., 0.01%, 0.1%, 1%, 5%, 10%, 15%, or 20% of the association of the fusion polypeptide with CRBN in the presence of COF2, e.g., an excess of COF2, e.g., as measured by an assay described herein, e.g., immunoprecipitation;
[0193] iii) the ubiquitination of the heterologous polypeptide in the absence of COF2 is no more than, e.g., 0.01%, 0.1%, 1%, 10%, 20%, 30%, 40%, 50%, 60%, or 70%, of the ubiquitination of the heterologous polypeptide in the presence of COF2, e.g., an excess of COF2, e.g., as measured by an assay described herein;
[0194] iv) the ubiquitination of the fusion polypeptide in the absence of COF2 is no more than, e.g., 0.01%, 0.1%, 1%, 10%, 20%, 30%, 40%, 50%, 60%, or 70%, of the ubiquitination of the fusion polypeptide in the presence of COF2, e.g., an excess of COF2, e.g., as measured by an assay described herein; or
[0195] v) the degradation of the fusion polypeptide in the absence of COF2 is no more than, e.g., 0.01%, 0.1%, 1%, 10%, 20%, 30%, 40%, 50%, 60%, or 70%, of the degradation of the fusion polypeptide in the presence of COF2, e.g., an excess of COF2, e.g., as measured by an assay described herein, e.g., a Western blot analysis or a flow cytometry analysis.

[0196] In some embodiments, the association, ubiquitination, and/or degradation is as measured in a mammalian cell, e.g., a human cell.

[0197] In some embodiments, the COF2/CRBN-binding polypeptide comprises amino acid residues 236-249 of IKZF3 (numbered according to SEQ ID NO: 19) (e.g., the COF2/CRBN-binding polypeptide comprises the amino acid sequence of SEQ ID NO: 11) or a sequence that differs from amino acid residues 236-249 of IKZF3 (numbered according to SEQ ID NO: 19) by no more than 1, 2, 3, 4, 5, 6, or 7 amino acid residues (e.g., a sequence that differs from amino acid residues 236-249 of SEQ ID NO: 19 by no more than 1, 2, 3, 4, 5, 6, or 7 amino acid residues) (e.g., a sequence having no more than 1, 2, 3, 4, 5, 6, or 7 amino acid substitutions from amino acid residues 236-249 of SEQ ID NO: 19).

[0198] In some embodiments, the COF2/CRBN-binding polypeptide comprises amino acid residues 236-249 of IKZF3 (numbered according to SEQ ID NO: 19). In some embodiments, the COF2/CRBN-binding polypeptide comprises the amino acid sequence of SEQ ID NO: 11.

[0199] In some embodiments, the COF2/CRBN-binding polypeptide comprises the amino acid sequence of SEQ ID NO: 91.

[0200] In some embodiments, the COF2/CRBN-binding polypeptide comprises sufficient amino acid sequence and/or a structural motif from amino acid residues 136-180 and 236-249 of IKZF3 (numbered according to SEQ ID NO: 19) (e.g., sufficient amino acid sequence and/or a structural motif from amino acid residues 136-180 and 236-249 of SEQ ID NO: 19) that:
[0201] i) the association of the COF2/CRBN-binding polypeptide with CRBN in the absence of COF2 is no more than, e.g., 0.01%, 0.1%, 1%, 5%, 10%, 15%, or 20%, of the association of the COF2/CRBN-binding polypeptide with CRBN in the presence of COF2, e.g., an excess of COF2, e.g., as measured by an assay described herein, e.g., immunoprecipitation;
[0202] ii) the association of the fusion polypeptide with CRBN in the absence of COF2 is no more than, e.g., 0.01%, 0.1%, 1%, 5%, 10%, 15%, or 20% of the association of the fusion polypeptide with CRBN in the presence of COF2, e.g., an excess of COF2, e.g., as measured by an assay described herein, e.g., immunoprecipitation;
[0203] iii) the ubiquitination of the heterologous polypeptide in the absence of COF2 is no more than, e.g., 0.01%, 0.1%, 1%, 10%, 20%, 30%, 40%, 50%, 60%, or 70%, of the ubiquitination of the heterologous polypeptide in the presence of COF2, e.g., an excess of COF2, e.g., as measured by an assay described herein;
[0204] iv) the ubiquitination of the fusion polypeptide in the absence of COF2 is no more than, e.g., 0.01%, 0.1%, 1%, 10%, 20%, 30%, 40%, 50%, 60%, or 70%, of the ubiquitination of the fusion polypeptide in the presence of COF2, e.g., an excess of COF2, e.g., as measured by an assay described herein; or
[0205] v) the degradation of the fusion polypeptide in the absence of COF2 is no more than, e.g., 0.01%, 0.1%, 1%, 10%, 20%, 30%, 40%, 50%, 60%, or 70%, of the degradation of the fusion polypeptide in the presence of COF2, e.g., an excess of COF2, e.g., as measured by an assay described herein, e.g., a Western blot analysis or a flow cytometry analysis.

[0206] In some embodiments, the association, ubiquitination, and/or degradation is as measured in a mammalian cell, e.g., a human cell.

[0207] In some embodiments, the COF2/CRBN-binding polypeptide comprises a first sequence comprising amino acid residues 136-180 of IKZF3 (numbered according to SEQ ID NO: 19) (e.g., a first sequence comprising the amino acid sequence of SEQ ID NO: 5) or a first sequence that differs from amino acid residues 136-180 of IKZF3 (numbered according to SEQ ID NO: 19) by no more than 1, 2, 3, 4, 5, 10, 15, 20, 25, 30, 35, or 40 amino acid residues (e.g., a first sequence that differs from amino acid residues 136-180 of SEQ ID NO: 19 by no more than 1, 2, 3, 4, 5, 10, 15, 20, 25, 30, 35, or 40 amino acid residues); and a second sequence comprising amino acid residues 236-249 of IKZF3 (numbered according to SEQ ID NO: 19) (e.g., a second sequence comprising the amino acid sequence of SEQ ID NO: 11) or a second sequence that differs from amino acid residues 236-249 of IKZF3 (numbered according to SEQ ID NO: 19) by no more than 1, 2, 3, 4, 5, 6, or 7 amino acid residues (e.g., a second sequence that differs from amino acid residues 236-249 of SEQ ID NO: 19 by no more than 1, 2, 3, 4, 5, 6, or 7 amino acid residues).

[0208] In some embodiments, the COF2/CRBN-binding polypeptide comprises amino acid residues 136-180 and 236-249 of IKZF3 (numbered according to SEQ ID NO: 19). In some embodiments, the COF2/CRBN-binding polypeptide comprises the amino acid sequence of SEQ ID NO: 1. In some embodiments, the COF2/CRBN-binding polypeptide comprises the amino acid sequence of SEQ ID NO: 3. In some embodiments, the COF2/CRBN-binding polypeptide consists of the amino acid sequence of SEQ ID NO: 1. In some embodiments, the COF2/CRBN-binding polypeptide consists of the amino acid sequence of SEQ ID NO: 3.

[0209] In some embodiments, the COF2/CRBN-binding polypeptide comprises a first sequence comprising amino acid residues 136-180 of IKZF3 (numbered according to SEQ ID NO: 19) and a second sequence comprising the amino acid sequence of MALEKMALEKMALE (SEQ ID NO: 91). In some embodiments, the COF2/CRBN-binding polypeptide comprises the amino acid sequence of SEQ ID NO: 14. In some embodiments, the COF2/CRBN-binding polypeptide comprises the amino acid sequence of SEQ ID NO: 85. In some embodiments, the COF2/CRBN-binding polypeptide consists of the amino acid sequence of SEQ ID NO: 14. In some embodiments, the COF2/CRBN-binding polypeptide consists of the amino acid sequence of SEQ ID NO: 85.

[0210] In some embodiments, the COF2/CRBN-binding polypeptide comprises a first sequence comprising amino acid residues 136-170 of IKZF3 (numbered according to SEQ ID NO: 19) and a second sequence comprising the amino acid sequence of MALEKMALEKMALE (SEQ ID NO: 91). In some embodiments, the COF2/CRBN-binding polypeptide comprises the amino acid sequence of SEQ ID NO: 15. In some embodiments, the COF2/CRBN-binding polypeptide comprises the amino acid sequence of SEQ ID NO: 86. In some embodiments, the COF2/CRBN-binding polypeptide consists of the amino acid sequence of SEQ ID NO: 15. In some embodiments, the COF2/CRBN-binding polypeptide consists of the amino acid sequence of SEQ ID NO: 86.

[0211] In some embodiments, the COF2/CRBN-binding polypeptide comprises at least one less lysine than the corresponding native sequence. In some embodiments, one or more lysine residues in the corresponding native sequence are replaced by a different amino acid, e.g., arginine. In some embodiments, the COF2/CRBN-binding polypeptide comprises less than 1, 2, 3, 4, or 5 lysine residues. In some embodiments, the COF2/CRBN-binding polypeptide does not comprise a lysine residue. In some embodiments, the COF2/CRBN-binding polypeptide is not ubiquitinated, e.g., in the presence of COF2, e.g., as measured by an assay described herein, optionally wherein ubiquitination is as measured in a mammalian cell, e.g., a human cell.

[0212] In some embodiments, the COF2/CRBN-binding polypeptide comprises an amino acid sequence selected from the group consisting of SEQ ID NOs: 4, 41, 42, and 43. In some embodiments, the COF2/CRBN-binding polypeptide comprises the amino acid sequence of SEQ ID NO: 4. In some embodiments, the COF2/CRBN-binding polypeptide comprises the amino acid sequence of SEQ ID NO: 41. In some embodiments, the COF2/CRBN-binding polypeptide comprises the amino acid sequence of SEQ ID NO: 42. In some embodiments, the COF2/CRBN-binding polypeptide comprises the amino acid sequence of SEQ ID NO: 43.

[0213] In some embodiments, the COF2/CRBN-binding polypeptide comprises the amino acid sequence of SEQ ID NO: 2. In some embodiments, the COF2/CRBN-binding polypeptide comprises the amino acid sequence of SEQ ID NO: 4. In some embodiments, the COF2/CRBN-binding polypeptide consists of the amino acid sequence of SEQ ID NO: 2. In some embodiments, the COF2/CRBN-binding polypeptide consists of the amino acid sequence of SEQ ID NO: 4.

[0214] In some embodiments, the COF2 is an immunomodulatory imide drug (IMiD), or a pharmaceutically acceptable salt thereof.

[0215] In some embodiments, the COF2 has the structure of Formula (I):

[chemical structure]

or a pharmaceutically acceptable salt, ester, hydrate, solvate, or tautomer thereof, wherein:
[0216] X is O or S;
[0217] R¹ is C₁-C₆ alkyl, C₂-C₆ alkenyl, C₂-C₆ alkynyl, C₁-C₆ heteroalkyl, carbocyclyl, heterocyclyl, aryl, or heteroaryl, each of which is independently and optionally substituted by one or more R⁴;
[0218] each of R^{2a} and R^{2b} is independently hydrogen or C₁-C₆ alkyl; or R^{2a} and R^{2b} together with the carbon atom to which they are attached form a carbonyl group or a thiocarbonyl group;
[0219] each of R³ is independently C₁-C₆ alkyl, C₂-C₆ alkenyl, C₂-C₆ alkynyl, C₁-C₆ heteroalkyl, halo, cyano, —C(O)R^{A}, —C(O)OR^{B}, —OR^{B}, —N(R^{C})(R^{D}), —C(O)N(R^{C})(R^{D}), —N(R^{C})C(O)R^{A}, —S(O)ₓR^{E}, —S(O)ₓN(R^{C})(R^{D}), or —N(R^{C})S(O)ₓR^{E}, wherein each alkyl, alkenyl, alkynyl, and heteroalkyl is independently and optionally substituted with one or more R⁶.
[0220] each R⁴ is independently C₁-C₆ alkyl, C₂-C₆ alkenyl, C₂-C₆ alkynyl, C₁-C₆ heteroalkyl, halo, cyano, oxo, —C(O)R^{A}, —C(O)OR^{B}, —OR^{B}, —N(R^{C})(R^{D}), —C(O)N(R^{C})(R^{D}), —N(R^{C})C(O)R^{A}, —S(O)ₓR^{E}, —S(O)ₓN(R^{C})(R^{D}), —N(R^{C})S(O)ₓR^{E}, carbocyclyl, heterocyclyl, aryl, or heteroaryl, wherein each alkyl, alkenyl, alkynyl, heteroalkyl, carbocyclyl, heterocyclyl, aryl, and heteroaryl is independently and optionally substituted with one or more R⁷;
[0221] each of R^{A}, R^{B}, R^{C}, R^{D}, and R^{E} is independently hydrogen or C₁-C₆ alkyl;
[0222] each R⁶ is independently C₁-C₆ alkyl, oxo, cyano, —OR^{B}, —N(R^{C})(R^{D}), —C(O)N(R^{C})(R^{D}), —N(R^{C})C(O)R^{A}, aryl, or heteroaryl, wherein each aryl and heteroaryl is independently and optionally substituted with one or more R⁸.
[0223] each R⁷ is independently halo, oxo, cyano, —OR^{B}, —N(R^{C})(R^{D}), —C(O)N(R^{C})(R^{D}), or —N(R^{C})C(O)R^{A};
[0224] each R⁸ is independently C₁-C₆ alkyl, cyano, —OR^{B}, —N(R^{C})(R^{D}), —C(O)N(R^{C})(R^{D}), or —N(R^{C})C(O)R^{A};
[0225] n is 0, 1, 2, 3 or 4; and
[0226] x is 0, 1, or 2.

[0227] In some embodiments, the COF2 has the structure of Formula (I-a):

[chemical structure]

or a pharmaceutically acceptable salt, ester, hydrate, or tautomer thereof, wherein:
[0228] Ring A is carbocyclyl, heterocyclyl, aryl, or heteroaryl, each of which is independently and optionally substituted with one or more R⁴;
[0229] M is absent, C₁-C₆ alkyl, C₂-C₆ alkenyl, C₂-C₆ alkynyl, or C₁-C₆ heteroalkyl, wherein each alkyl, alkenyl, alkynyl, and heteroalkyl is independently and optionally substituted with one or more R⁴;
[0230] each of R^{2a} and R^{2b} is independently hydrogen or C₁-C₆ alkyl; or R^{2a} and R^{2b} together with the carbon atom to which they are attached to form a carbonyl group or thiocarbonyl group;
[0231] R^{3a} is hydrogen, C₁-C₆ alkyl, C₂-C₆ alkenyl, C₂-C₆ alkynyl, C₁-C₆ heteroalkyl, halo, cyano, —C(O)R^{A}, —C(O)OR^{B}, —OR^{B}, —N(R^{C})(R^{D}), —C(O)N(R^{C})(R^{D}), —N(R^{C})C(O)R^{A}, —S(O)ₓR^{E}, —S(O)ₓN(R^{C})(R^{D}), or —N(R^{C})S(O)ₓR^{E}, wherein each alkyl, alkenyl, alkynyl, and heteroalkyl is independently and optionally substituted with one or more R⁶.
[0232] each of R³ is independently C₁-C₆ alkyl, C₂-C₆ alkenyl, C₂-C₆ alkynyl, C₁-C₆ heteroalkyl, halo, cyano, —C(O)R^{A}, —C(O)OR^{B}, —OR^{B}, —N(R^{C})(R^{D}), —C(O)N(R^{C})(R^{D}), —N(R^{C})C(O)R^{A}, —S(O)ₓR^{E}, —S(O)ₓN(R^{C})(R^{D}), or —N(R^{C})S(O)ₓR^{E}, wherein each alkyl, alkenyl, alkynyl, and heteroalkyl is independently and optionally substituted with one or more R⁶.
[0233] each R⁴ is independently C₁-C₆ alkyl, C₂-C₆ alkenyl, C₂-C₆ alkynyl, C₁-C₆ heteroalkyl, halo, cyano, oxo, —C(O)R^{A}, —C(O)OR^{B}, —OR^{B}, —N(R^{C})(R^{D}), —C(O)N(R^{C})(R^{D}), —N(R^{C})C(O)R^{A}, S(O)_{X}R^{E}, —S(O)ₓN(R^{C})(R^{D}), —N(R^{C})S(O)ₓR^{E}, carbocyclyl, heterocyclyl, aryl, or heteroaryl, wherein each alkyl, alkenyl, alkynyl, carbocyclyl, heterocyclyl, aryl, and heteroaryl is independently and optionally substituted with one or more R⁷;
[0234] each of R^{A}, R^{B}, R^{C}, R^{D}, and R^{E} is independently hydrogen or C₁-C₆ alkyl;
[0235] each R⁶ is independently C₁-C₆ alkyl, oxo, cyano, —OR^{B}, —N(R^{C})(R^{D}), —C(O)N(R^{C})(R^{D}), —N(R^{C})C(O)R^{A}, aryl, or heteroaryl, wherein each aryl and heteroaryl is independently and optionally substituted with one or more R⁸.
[0236] each R⁷ is independently halo, oxo, cyano, —OR^{B}, —N(R^{C})(R^{D}), —C(O)N(R^{C})(R^{D}), or —N(R^{C})C(O)R^{A};
[0237] each R⁸ is independently C₁-C₆ alkyl, cyano, —OR^{B}, —N(R^{C})(R^{D}), —C(O)N(R^{C})(R^{D}), or —N(R^{C})C(O)R^{A};
[0238] n is 0, 1, 2, or 3;
[0239] is 0, 1, 2, 3, 4, or 5; and
[0240] x is 0, 1, or 2.

[0241] In some embodiments, the COF2 is thalidomide or analogue, or a pharmaceutically acceptable salt thereof. In some embodiments, the COF2 is selected from the group consisting of lenalidomide, pomalidomide, thalidomide, and 2-(4-(tert-butyl)phenyl)-N-((2-(2,6-dioxopiperidin-3-yl)-1-oxoisoindolin-5-yl)methyl)acetamide, or a pharmaceutically acceptable salt thereof.

[0242] In some embodiments, the COF2 is selected from the group consisting of:

[chemical structure]

or a pharmaceutically acceptable salt thereof.

[0243] In some embodiments, the COF2 is lenalidomide or pomalidomide, or a pharmaceutically acceptable salt thereof. In some embodiments, the COF2 is lenalidomide or analogue, or a pharmaceutically acceptable salt thereof. In some embodiments, the COF2 is lenalidomide, or a pharmaceutically acceptable salt thereof.

[0244] In some embodiments, the COF2 comprises the structure of Formula (I):

[chemical structure]

or a pharmaceutically acceptable salt, ester, hydrate, solvate, or tautomer thereof, wherein:
[0245] X is O or S;
[0246] R¹ is C₁-C₆ alkyl, C₂-C₆ alkenyl, C₂-C₆ alkynyl, C₁-C₆ heteroalkyl, carbocyclyl, heterocyclyl, aryl, or heteroaryl, each of which is independently and optionally substituted by one or more R⁴;
[0247] each of R^{2a} and R^{2b} is independently hydrogen or C₁-C₆ alkyl; or R^{2a} and R^{2b} together with the carbon atom to which they are attached form a carbonyl group or a thiocarbonyl group;
[0248] each of R³ is independently C₁-C₆ alkyl, C₂-C₆ alkenyl, C₂-C₆ alkynyl, C₁-C₆ heteroalkyl, halo, cyano, —C(O)R^{A}, —C(O)OR^{B}, —OR^{B}, —N(R^{C})(R^{D}), —C(O)N(R^{C})(R^{D}), —N(R^{C})C(O)R^{A}, —S(O)ₓR^{E}, —S(O)ₓN(R^{C})(R^{D}), or —N(R^{C})S(O)ₓR^{E}, wherein each alkyl, alkenyl, alkynyl, and heteroalkyl is independently and optionally substituted with one or more R⁶.
[0249] each R⁴ is independently C₁-C₆ alkyl, C₂-C₆ alkenyl, C₂-C₆ alkynyl, C₁-C₆ heteroalkyl, halo, cyano, oxo, —C(O)R^{A}, —C(O)OR^{B}, —OR^{B}, —N(R^{C})(R^{D}), —C(O)N(R^{C})(R^{D}), —N(R^{C})C(O)R^{A}, —S(O)ₓR^{E}, —S(O)ₓN(R^{C})(R^{D}), —N(R^{C})S(O)ₓR^{E}, carbocyclyl, heterocyclyl, aryl, or heteroaryl, wherein each alkyl, alkenyl, alkynyl, heteroalkyl, carbocyclyl, heterocyclyl, aryl, and heteroaryl is independently and optionally substituted with one or more R⁷;
[0250] each of R^{A}, R^{B}, R^{C}, R^{D}, and R^{E} is independently hydrogen or C₁-C₆ alkyl;
[0251] each R⁶ is independently C₁-C₆ alkyl, oxo, cyano, —OR^{B}, —N(R^{C})(R^{D}), —C(O)N(R^{C})(R^{D}), —N(R^{C})C(O)R^{A}, aryl, or heteroaryl, wherein each aryl and heteroaryl is independently and optionally substituted with one or more R⁸;
[0252] each R⁷ is independently halo, oxo, cyano, —OR^{B}, —N(R^{C})(R^{D}), —C(O)N(R^{C})(R^{D}), or —N(R^{C})C(O)R^{A};
[0253] each R⁸ is independently C₁-C₆ alkyl, cyano, —OR^{B}, —N(R^{C})(R^{D}), —C(O)N(R^{C})(R^{D}), or —N(R^{C})C(O)R^{A};
[0254] n is 0, 1, 2, 3 or 4; and
[0255] x is 0, 1, or 2.

[0256] In some embodiments, the COF2 comprises the structure of Formula (I-a):

[chemical structure]

or a pharmaceutically acceptable salt, ester, hydrate, or tautomer thereof, wherein:
[0257] Ring A is carbocyclyl, heterocyclyl, aryl, or heteroaryl, each of which is independently and optionally substituted with one or more R⁴;
[0258] M is absent, C₁-C₆ alkyl, C₂-C₆ alkenyl, C₂-C₆ alkynyl, or C₁-C₆ heteroalkyl, wherein each alkyl, alkenyl, alkynyl, and heteroalkyl is independently and optionally substituted with one or more R⁴;
[0259] each of R^{2a} and R^{2b} is independently hydrogen or C₁-C₆ alkyl; or R^{2a} and R^{2b} together with the carbon atom to which they are attached to form a carbonyl group or thiocarbonyl group;
[0260] R^{3a} is hydrogen, C₁-C₆ alkyl, C₂-C₆ alkenyl, C₂-C₆ alkynyl, C₁-C₆ heteroalkyl, halo, cyano, —C(O)R^{A}, —C(O)OR^{B}, —OR^{B}, —N(R^{C})(R^{D}), —C(O)N(R^{C})(R^{D}), —N(R^{C})C(O)R^{A}, —S(O)ₓR^{E}, —S(O)ₓN(R^{C})(R^{D}), or —N(R^{C})S(O)ₓR^{E}, wherein each alkyl, alkenyl, alkynyl, and heteroalkyl is independently and optionally substituted with one or more R⁶.
[0261] each of R³ is independently C₁-C₆ alkyl, C₂-C₆ alkenyl, C₂-C₆ alkynyl, C₁-C₆ heteroalkyl, halo, cyano, —C(O)R^{A}, —C(O)OR^{B}, —OR^{B}, —N(R^{C})(R^{D}), —C(O)N(R^{C})(R^{D}), —N(R^{C})C(O)R^{A}, —S(O)ₓR^{E}, —S(O)ₓN(R^{C})(R^{D}), or —N(R^{C})S(O)ₓR^{E}, wherein each alkyl, alkenyl, alkynyl, and heteroalkyl is independently and optionally substituted with one or more R⁶.
[0262] each R⁴ is independently C₁-C₆ alkyl, C₂-C₆ alkenyl, C₂-C₆ alkynyl, C₁-C₆ heteroalkyl, halo, cyano, oxo, —C(O)R^{A}, —C(O)OR^{B}, —OR^{B}, —N(R^{C})(R^{D}), —C(O)N(R^{C})(R^{D}), —N(R^{C})C(O)R^{A}, S(O)_{X}R^{E}, —S(O)ₓN(R^{C})(R^{D}), —N(R^{C})S(O)ₓR^{E}, carbocyclyl, heterocyclyl, aryl, or heteroaryl, wherein each alkyl, alkenyl, alkynyl, carbocyclyl, heterocyclyl, aryl, and heteroaryl is independently and optionally substituted with one or more R⁷;
[0263] each of R^{A}, R^{B}, R^{C}, R^{D}, and R^{E} is independently hydrogen or C₁-C₆ alkyl;
[0264] each R⁶ is independently C₁-C₆ alkyl, oxo, cyano, —OR^{B}, —N(R^{C})(R^{D}), —C(O)N(R^{C})(R^{D}), —N(R^{C})C(O)R^{A}, aryl, or heteroaryl, wherein each aryl and heteroaryl is independently and optionally substituted with one or more R⁸;
[0265] each R⁷ is independently halo, oxo, cyano, —OR^{B}, —N(R^{C})(R^{D}), —C(O)N(R^{C})(R^{D}), or —N(R^{C})C(O)R^{A};
[0266] each R⁸ is independently C₁-C₆ alkyl, cyano, —OR^{B}, —N(R^{C})(R^{D}), —C(O)N(R^{C})(R^{D}), or —N(R^{C})C(O)R^{A};
[0267] n is 0, 1, 2, or 3;
[0268] o is 0, 1, 2, 3, 4, or 5; and
[0269] x is 0, 1, or 2.

[0270] In some embodiments, the COF2 comprises an immunomodulatory imide drug (IMiD), or a pharmaceutically acceptable salt thereof. In some embodiments, the COF2 comprises thalidomide or analogue, or a pharmaceutically acceptable salt thereof. In some embodiments, the COF2 comprises lenalidomide, pomalidomide, thalidomide, and 2-(4-(tert-butyl)phenyl)-N-((2-(2,6-dioxopiperidin-3-yl)-1-oxoisoindolin-5-yl)methyl)acetamide, or a pharmaceutically acceptable salt thereof.

[0271] In some embodiments, the COF2 comprises a compound selected from the group consisting of:

[chemical structure]

or a pharmaceutically acceptable salt thereof.

[0272] In some embodiments, the COF2 comprises lenalidomide or pomalidomide, or a pharmaceutically acceptable salt thereof. In some embodiments, the COF2 comprises lenalidomide or analogue, or a pharmaceutically acceptable salt thereof. In some embodiments, the COF2 comprises lenalidomide, or a pharmaceutically acceptable salt thereof.

[0273] In some embodiments, the COF2 further comprises a ligand (e.g., wherein R¹⁰ in Formula (II) is L-Tag). In some embodiments, R¹⁰ in Formula (II) is L-Tag, L is a linker selected from a linker disclosed in International Patent Publication No. WO2017/024318 (e.g., FIGS. 28-31), and Tag is selected from a dTAG Targeting Ligand disclosed in International Patent Publication No. WO2017/024318 (e.g., Table T, pages 119-129). In some embodiments, the COF2 comprises IMiD (e.g., lenalidomide or pomalidomide, or a pharmaceutically acceptable salt thereof) and a ligand, wherein the IMiD (e.g., lenalidomide or pomalidomide, or a pharmaceutically acceptable salt thereof) is linked to the ligand, e.g., via a linker. In some embodiments, the COF2/CRBN-binding polypeptide binds to the ligand and wherein the binding between the COF2/CRBN-binding polypeptide and IMiD (e.g., lenalidomide or pomalidomide, or a pharmaceutically acceptable salt thereof) in the absence of the ligand is no more than 0.0001, 0.001, 0.01, 0.1, 1, or 10% of the binding between the COF2/CRBN-binding polypeptide and the ligand, e.g., the COF2/CRBN-binding polypeptide does not bind to IMiD (e.g., lenalidomide or pomalidomide, or a pharmaceutically acceptable salt thereof), optionally wherein the COF2/CRBN-binding polypeptide is selected from a dTAG disclosed in International Patent Publication No. WO2017/024318 (e.g., pages 36-65).

[0274] In one aspect, provided herein is a fusion polypeptide comprising a compound of Formula (III) (COF3)/CRBN-binding polypeptide and a heterologous polypeptide, wherein the compound of Formula (III) is:

[chemical structure]

or a pharmaceutically acceptable salt, ester, hydrate, solvate, or tautomer thereof, wherein:
[0275] X₁ is CR₃;
[0276] [symbol] is optionally a double bond when X₁ is CR₃ and R₃ is absent;
[0277] each R₁ is independently C₁-C₆ alkyl, C₁-C₆ haloalkyl, C₁-C₆ hydroxyalkyl, or halo, or
[0278] two R₁ together with the carbon atoms to which they are attached form a 5- or 6-membered heterocyclyl ring, or
[0279] two R₁, when on adjacent atoms, together with the atoms to which they are attached form a C₆-C₁₀ aryl or 5- or 6-membered heteroaryl ring comprising 1 to 3 heteroatoms selected from O, N, and S;
[0280] R₂ is hydrogen, C₁-C₆ alkyl, —C(O)C₁-C₆ alkyl, —C(O)(CH₂)₀₋₃— C₆-C₁₀ aryl, —C(O)O(CH₂)₀₋₃—C₆-C₁₀ aryl, C₆-C₁₀ aryl, or 5- or 6-membered heteroaryl comprising 1 to 3 heteroatoms selected from O, N, and S, C₃-C₈ carbocyclyl, or 5- to 7-heterocyclyl comprising 1 to 3 heteroatoms selected from O, N, and S, wherein the alkyl is optionally substituted with one or more R₄; and the aryl, heteroaryl, carbocyclyl, and heterocyclyl are optionally substituted with one or more R₅, or
[0281] R₁ and R₂, when on adjacent atoms, together with the atoms to which they are attached form a 5- or 6-membered heterocyclyl ring;
[0282] R₃ is hydrogen, or R₃ is absent when [symbol] is a double bond;
[0283] each R₄ is independently selected from —C(O)OR₆, —C(O)NR₆R_{6′}, —NR₆C(O)R_{6′}, halo, —OH, —NH₂, cyano, C₆-C₁₀ aryl, 5- or 6-membered heteroaryl comprising 1 to 4 heteroatoms selected from O, N, and S, C₃-C₈ carbocyclyl, and 5- to 7-membered heterocyclyl ring comprising 1 to 3 heteroatoms selected from O, N, and S, wherein the aryl, heteroaryl, carbocyclyl, and heterocyclyl are optionally substituted with one or more R₇;
[0284] each R₅ is independently selected from C₁-C₆ alkyl, C₂-C₆ alkenyl, C₂-C₆ alkynyl, C₁-C₆ alkoxy, C₁-C₆ haloalkyl, C₁-C₆ haloalkoxy, C₁-C₆ hydroxyalkyl, halo, —OH, —NH₂, cyano, C₃-C₇ carbocyclyl, 5- to 7-membered heterocyclyl comprising 1 to 3 heteroatoms selected from O, N, and S, C₆-C₁₀ aryl, and 5- or 6-membered heteroaryl comprising 1 to 3 heteroatoms selected from O, N, and S, or
[0285] two R₅, when on adjacent atoms, together with the atoms to which they are attached form a C₆-C₁₀ aryl or 5- or 6-membered heteroaryl comprising 1 to 3 heteroatoms selected from O, N, and S, optionally substituted with one or more R₁₀, or
[0286] two R₅, when on adjacent atoms, together with the atoms to which they are attached form a C₅-C₇ carbocyclyl or 5- to 7-membered heterocyclyl comprising 1 to 3 heteroatoms selected from O, N, and S optionally substituted with one or more R₁₀;
[0287] R₆ and R_{6′} are each independently hydrogen, C₁-C₆ alkyl, or C₆-C₁₀ aryl;
[0288] each R₇ is independently selected from C₁-C₆ alkyl, C₂-C₆ alkenyl, C₂-C₆ alkynyl, C₁-C₆ alkoxy, C₁-C₆ haloalkyl, C₁-C₆ haloalkoxy, —C(O)R₈, —(CH₂)₀₋₃C(O)OR₈, —C(O)NR₈R₉, —NR₈C(O)R₉, —NR₈C(O)OR₉, —S(O)ₚNR₈R₉, —S(O)ₚR₁₂, (C₁-C₆)hydroxyalkyl, halo, —OH, —O(CH₂)₁₋₃CN, —NH₂, cyano, —O(CH₂)₀₋₃— C₆-C₁₀ aryl, adamantyl, —O(CH₂)₀₋₃-5- or 6-membered heteroaryl comprising 1 to 3 heteroatoms selected from O, N, and S, C₆-C₁₀ aryl, monocyclic or bicyclic 5- to 10-membered heteroaryl comprising 1 to 3 heteroatoms selected from O, N, and S, C₃-C₇ carbocyclyl, and 5- to 7-membered heterocyclyl comprising 1 to 3 heteroatoms selected from O, N, and S, wherein the alkyl is optionally substituted with one or more R₁₁, and the aryl, heteroaryl, and heterocyclyl are optionally substituted with one or more substituents each independently selected from halogen, C₁-C₆ alkyl, C₁-C₆ haloalkyl, and C₁-C₆ alkoxy, or
[0289] two R₇ together with the carbon atom to which they are attached form a ═(O), or
[0290] two R₇, when on adjacent atoms, together with the atoms to which they are attached form a C₆-C₁₀ aryl or 5- or 6-membered heteroaryl comprising 1 to 3 heteroatoms selected from O, N, and S, optionally substituted with one or more R₁₀, or
[0291] two R₇ together with the atoms to which they are attached form a C₅-C₇ carbocyclyl or a 5- to 7-membered heterocyclyl comprising 1 to 3 heteroatoms selected from O, N, and S, optionally substituted with one or more R₁₀;
[0292] R₈ and R₉ are each independently hydrogen or C₁-C₆ alkyl;
[0293] each R₁₀ is independently selected from C₁-C₆ alkyl, C₁-C₆ alkoxy, C₁-C₆ haloalkyl, C₁-C₆ haloalkoxy, C₁-C₆ hydroxyalkyl, halo, —OH, —NH₂, and cyano, or
[0294] two R₁₀ together with the carbon atom to which they are attached form a ═(O);
[0295] each R₁₁ is independently selected from cyano, C₁-C₆ alkoxy, C₆-C₁₀ aryl, and 5- to 7-membered heterocyclyl comprising 1 to 3 heteroatoms selected from O, N, and S, wherein each aryl and heterocyclyl is optionally substituted with one or more substituents each independently selected from C₁-C₆ alkyl, C₁-C₆ alkoxy, C₁-C₆ haloalkyl, C₁-C₆ haloalkoxy, C₁-C₆ hydroxyalkyl, halo, —OH, —NH₂, and cyano;
[0296] R₁₂ is C₁-C₆ alkyl, C₁-C₆ haloalkyl, C₆-C₁₀ aryl, or 5- to 7-membered heterocyclyl comprising 1 to 3 heteroatoms selected from O, N, and S;
[0297] Rₓ is hydrogen or deuterium;
[0298] p is 0, 1, or 2;
[0299] n is 0, 1, or 2;
[0300] y is 1 or 2, wherein n+y≤3; and
[0301] q is 0, 1, 2, 3, or 4.

[0302] In one embodiment, the compound of Formula (III) is a compound of Formula (III-b):

[chemical structure]

or a pharmaceutically acceptable salt, hydrate, solvate, prodrug, stereoisomer, and tautomer thereof, wherein X₁, R₁, R₂, n, q, and subvariables thereof are defined as described above for Formula (III).

[0303] In one embodiment, the compound of Formula (III) is a compound of Formula (III-d):

[chemical structure]

or a pharmaceutically acceptable salt, hydrate, solvate, prodrug, stereoisomer, and tautomer thereof, wherein R₁, R₂, q, and subvariables thereof are defined as described above for Formula (III).

[0304] In one embodiment, the COF3/CRBN-binding polypeptide is fused to the heterologous polypeptide. In one embodiment, the COF3/CRBN-binding polypeptide and the heterologous polypeptide are linked by a peptide bond. In one embodiment, the COF3/CRBN-binding polypeptide and the heterologous polypeptide are linked by a bond other than a peptide bond. In one embodiment, the heterologous polypeptide is linked directly to the COF3/CRBN-binding polypeptide. In one embodiment, the heterologous polypeptide is linked indirectly to the COF3/CRBN-binding polypeptide. In one embodiment, the COF3/CRBN-binding polypeptide and the heterologous polypeptide are operatively linked via a linker, e.g., a glycine-serine linker, e.g., a linker comprising the amino acid sequence of SEQ ID NO: 28. In one embodiment, the COF3/CRBN-binding polypeptide is linked to the C-terminus of the heterologous polypeptide. In one embodiment, the COF3/CRBN-binding polypeptide is linked to the N-terminus of the heterologous polypeptide.

[0305] In one embodiment, the association of the fusion polypeptide with CRBN in the absence of COF3 is no more than, e.g., 0.01%, 0.1%, 1%, 5%, 10%, 15%, or 20%, of the association of the fusion polypeptide with CRBN in the presence of COF3, e.g., an excess of COF3, e.g., as measured by an assay described herein, e.g., immunoprecipitation. In one embodiment, the fusion polypeptide does not bind to CRBN in the absence of COF3. In one embodiment, the ubiquitination of the fusion polypeptide in the absence of COF3 is no more than, e.g., 0.01%, 0.1%, 1%, 10%, 20%, 30%, 40%, 50%, 60%, or 70%, of the ubiquitination of the fusion polypeptide in the presence of COF3, e.g., an excess of COF3, e.g., as measured by an assay described herein. In one embodiment, the fusion polypeptide is ubiquitinated at one or more lysine or methionine residues in the presence of COF3. In one embodiment, the degradation of the fusion polypeptide in the absence of COF3 is no more than, e.g., 0.01%, 0.1%, 1%, 10%, 20%, 30%, 40%, 50%, 60%, or 70% of the degradation of the fusion polypeptide in the presence of COF3, e.g., an excess of COF3, e.g., as measured by an assay described herein, e.g., a Western blot analysis or a flow cytometry analysis. In one embodiment, the degradation of the fusion polypeptide is mediated by ubiquitination in the presence of COF3. In one embodiment, the association, ubiquitination, and/or degradation is as measured in a mammalian cell, e.g., a human cell.

[0306] In one embodiment, the COF3/CRBN-binding polypeptide is between 10 and 95 amino acid residues in length, between 15 and 90 amino acid residues in length, between 20 and 85 amino acid residues in length, between 25 and 80 amino acid residues in length, between 30 and 75 amino acid residues in length, between 35 and 70 amino acid residues in length, between 40 and 65 amino acid residues in length, between 45 and 65 amino acid residues in length, between 50 and 65 amino acid residues in length, or between 55 and 65 amino acid residues in length. In one embodiment, the COF3/CRBN-binding polypeptide is 59 amino acid residues in length.

[0307] In one embodiment, the COF3/CRBN-binding polypeptide comprises a beta turn. In one embodiment, the COF3/CRBN-binding polypeptide comprises a beta hairpin. In one embodiment, the COF3/CRBN-binding polypeptide comprises a beta strand. In one embodiment, the COF3/CRBN-binding polypeptide comprises an alpha helix. In one embodiment, the COF3/CRBN-binding polypeptide comprises, from N-terminus to C-terminus, a first beta strand, a beta hairpin, a second beta strand, and a first alpha helix. In one embodiment, the COF3/CRBN-binding polypeptide comprises, from N-terminus to C-terminus, a first beta strand, a beta hairpin, a second beta strand, a first alpha helix, and a second alpha helix. In one embodiment, the beta hairpin and the second alpha helix are separated by no more than 60, 50, 40, or 30 amino acid residues.

[0308] In one embodiment, the COF3/CRBN-binding polypeptide comprises a COF3/CRBN-binding sequence from a naturally occurring polypeptide or a COF3/CRBN-binding variant thereof. In one embodiment, the COF3/CRBN-binding polypeptide comprises a COF3/CRBN-binding sequence from a naturally occurring IKZF polypeptide or a COF3/CRBN-binding variant thereof. In one embodiment, the COF3/CRBN-binding polypeptide comprises a COF3/CRBN-binding sequence from a naturally occurring IKZF2, or a COF3/CRBN-binding variant thereof. In one embodiment, the COF3/CRBN-binding polypeptide comprises two or more discontinuous sequences from a naturally occurring IKZF polypeptide, e.g., a naturally occurring IKZF2.

[0309] In one embodiment, the COF3/CRBN-binding polypeptide comprises amino acid residues 130-174 of IKZF2 (numbered according to SEQ ID NO: 21). In one embodiment, the COF3/CRBN-binding polypeptide comprises the amino acid sequence of SEQ ID NO: 113. In one embodiment, the COF3/CRBN-binding polypeptide comprises a sequence that differs from amino acid residues 130-174 of IKZF2 (numbered according to SEQ ID NO: 21) by no more than 1, 2, 3, 4, 5, 10, 15, 20, 25, 30, 35, or 40 amino acid residues. In one embodiment, the COF3/CRBN-binding polypeptide comprises a sequence that differs from amino acid residues 130-174 of SEQ ID NO: 21 by no more than 1, 2, 3, 4, 5, 10, 15, 20, 25, 30, 35, or 40 amino acid residues. In one embodiment, the COF3/CRBN-binding polypeptide comprise a sequence having no more than 1, 2, 3, 4, 5, 10, 15, 20, 25, 30, 35, or 40 amino acid substitutions from amino acid residues 130-174 of SEQ ID NO: 21.

[0310] In one embodiment, the COF3/CRBN-binding polypeptide comprises amino acid residues 230-243 of IKZF2 (numbered according to SEQ ID NO: 21). In one embodiment, the COF3/CRBN-binding polypeptide comprises the amino acid sequence of SEQ ID NO: 114. In one embodiment, the COF3/CRBN-binding polypeptide comprises a sequence that differs from amino acid residues 230-243 of IKZF2 (numbered according to SEQ ID NO: 21) by no more than 1, 2, 3, 4, 5, or 10 amino acid residues. In one embodiment, the COF3/CRBN-binding polypeptide comprises a sequence that differs from amino acid residues 230-243 of SEQ ID NO: 21 by no more than 1, 2, 3, 4, 5, or 10 amino acid residues. In one embodiment, the COF3/CRBN-binding polypeptide comprises a sequence having no more than 1, 2, 3, 4, 5, or 10 amino acid substitutions from amino acid residues 230-243 of SEQ ID NO: 21.

[0311] In one embodiment, histidine at position 141 remains unaltered, numbered according to SEQ ID NO: 21.

[0312] In one embodiment, the COF3/CRBN-binding polypeptide comprises amino acid residues 130-174 of IKZF2 (numbered according to SEQ ID NO: 21). In one embodiment, the COF3/CRBN-binding polypeptide comprises the amino acid sequence of SEQ ID NO: 113. In one embodiment, the COF3/CRBN-binding polypeptide comprises amino acid residues 230-243 of IKZF2 (numbered according to SEQ ID NO: 21). In one embodiment, the COF3/CRBN-binding polypeptide comprises the amino acid sequence of SEQ ID NO: 114. In one embodiment, the COF3/CRBN-binding polypeptide comprises or consists of the amino acid sequence of SEQ ID NO: 109.

[0313] In some embodiments, the fusion polypeptide further comprises a degradation domain, wherein the degradation domain is separated from the COF3/CRBN-binding polypeptide and the heterologous polypeptide by a heterologous protease cleavage site.

[0314] In some embodiments, the fusion polypeptide comprises, from N-terminus to C-terminus:
[0315] i) the degradation domain, the heterologous protease cleavage site, the heterologous polypeptide, and the COF3/CRBN-binding polypeptide;
[0316] ii) the degradation domain, the heterologous protease cleavage site, the COF3/CRBN-binding polypeptide, and the heterologous polypeptide;
[0317] iii) the COF3/CRBN-binding polypeptide, the heterologous polypeptide, the heterologous protease cleavage site, and the degradation domain; or
[0318] iv) the heterologous polypeptide, and the COF3/CRBN-binding polypeptide, the heterologous protease cleavage site, and the degradation domain.

[0319] In some embodiments, the fusion polypeptide comprises, from N-terminus to C-terminus, the degradation domain, the heterologous protease cleavage site, the heterologous polypeptide, and the COF3/CRBN-binding polypeptide.

[0320] In some embodiments, the degradation domain has a first state associated with a first level of expression of the fusion polypeptide and a second state associated with a second level of expression of the fusion polypeptide, wherein the second level is increased, e.g., by at least 2-, 3-, 4-, 5-, 10-, 20- or 30-fold over the first level in the presence of a stabilization compound.

[0321] In some embodiments, in the absence of the stabilization compound, the fusion polypeptide is degraded by a cellular degradation pathway, e.g., at least 50%, 60%, 70%, 80%, 90% or greater of the fusion polypeptide is degraded, e.g., as measured by an assay described herein, e.g., a Western blot analysis or a flow cytometry analysis.

[0322] In some embodiments, the level of expression, and/or degradation is as measured in a mammalian cell, e.g., a human cell.

[0323] In some embodiments, in the presence of the stabilization compound:
[0324] i) the degradation domain assumes a conformation more resistant to cellular degradation relative to a conformation in the absence of the stabilization compound; or
[0325] ii) the conformation of the fusion polypeptide is more permissive to cleavage at the heterologous protease cleavage site relative to a conformation in the absence of the stabilization compound.

[0326] In some embodiments, the degradation domain is chosen from an estrogen receptor (ER) domain, an FKB protein (FKBP) domain, or a dihydrofolate reductase (DHFR) domain.

[0327] In some embodiments, the degradation domain is an estrogen receptor (ER) domain. In some embodiments, the degradation domain comprises an amino acid sequence that is at least 90, 95, 97, 98, 99, or 100% identical to SEQ ID NO: 46 or 48. In some embodiments, the degradation domain comprises the amino acid sequence of SEQ ID NO: 46. In some embodiments, the degradation domain comprises the amino acid sequence of SEQ ID NO: 48.

[0328] In some embodiments, the stabilization compound is bazedoxifene or 4-hydroxy tamoxifen (4-OHT), or a pharmaceutically acceptable salt thereof. In some embodiments, the degradation domain is an estrogen receptor (ER) domain and the stabilization compound is bazedoxifene, or a pharmaceutically acceptable salt thereof. In some embodiments, the degradation domain comprises the amino acid sequence of SEQ ID NO: 46 and the stabilization compound is bazedoxifene, or a pharmaceutically acceptable salt thereof.

[0329] In some embodiments, the degradation domain is an FKB protein (FKBP) domain. In some embodiments, the degradation domain comprises an amino acid sequence that is at least 90, 95, 97, 98, 99, or 100% identical to SEQ ID NO: 50. In some embodiments, the degradation domain comprises the amino acid sequence of SEQ ID NO: 50. In some embodiments, the stabilization compound is Shield-1, or a pharmaceutically acceptable salt thereof.

[0330] In some embodiments, the degradation domain is a dihydrofolate reductase (DHFR) domain. In some embodiments, the degradation domain comprises an amino acid sequence that is at least 90, 95, 97, 98, 99, or 100% identical to SEQ ID NO: 51. In some embodiments, the degradation domain comprises the amino acid sequence of SEQ ID NO: 51. In some embodiments, the stabilization compound is trimethoprim, or a pharmaceutically acceptable salt thereof.

[0331] In some embodiments, the heterologous protease cleavage site is cleaved by a mammalian intracellular protease. In some embodiments, the heterologous protease cleavage site is cleaved by a protease selected from the group consisting of furin, PCSK1, PCSK5, PCSK6, PCSK7, cathepsin B, Granzyme B, Factor XA, Enterokinase, genenase, sortase, precission protease, thrombin, TEV protease, and elastase 1. In some embodiments, the heterologous protease cleavage site comprises a sequence having a cleavage motif selected from the group consisting of RX(K/R)R consensus motif (X can be any amino acid; SEQ ID NO: 52), RXXX[KR]R consensus motif (X can be any amino acid; SEQ ID NO: 53), RRX consensus motif (SEQ ID NO: 54), I-E-P-D-X consensus motif (SEQ ID NO: 55), Ile-Glu/Asp-Gly-Arg (SEQ ID NO: 56), Asp-Asp-Asp-Asp-Lys (SEQ ID NO: 57), Pro-Gly-Ala-Ala-His-Tyr (SEQ ID NO: 58), LPXTG/A consensus motif (SEQ ID NO: 59), Leu-Glu-Val-Phe-Gln-Gly-Pro (SEQ ID NO: 60), Leu-Val-Pro-Arg-Gly-Ser (SEQ ID NO: 61), E-N-L-Y-F-Q-G (SEQ ID NO: 62), and [AGSV]-X (X can be any amino acid; SEQ ID NO: 63). In some embodiments, the heterologous protease cleavage site is cleaved by furin. In some embodiments, the heterologous protease cleavage site comprises a furin cleavage site selected from the group consisting of RTKR (SEQ ID NO: 123); GTGAEDPRPSRKRRSLGDVG (SEQ ID NO: 125); GTGAEDPRPSRKRR (SEQ ID NO: 127); LQWLEQQVAKRRTKR (SEQ ID NO: 129); GTGAEDPRPSRKRRSLGG (SEQ ID NO: 131); GTGAEDPRPSRKRRSLG (SEQ ID NO: 133); SLNLTESHNSRKKR (SEQ ID NO: 135); CKINGYPKRGRKRR (SEQ ID NO: 137); and SARNRQKR (SEQ ID NO: 34). In some embodiments, the heterologous protease cleavage site does not comprise the amino acid sequence of SARNRQKR (SEQ ID NO: 34). In some embodiments, the heterologous protease cleavage site comprises the furin cleavage site of GTGAEDPRPSRKRRSLGDVG (SEQ ID NO: 125). In some embodiments, the heterologous protease cleavage site is cleaved by a mammalian extracellular protease. In some embodiments, the mammalian extracellular protease is selected from the group consisting of Factor XA, Enterokinase, genenase, sortase, precission protease, thrombin, TEV protease, and elastase 1. In some embodiments, the heterologous protease cleavage site comprises an amino acid sequence selected from the group consisting of Ile-Glu/Asp-Gly-Arg (SEQ ID NO: 56), Asp-Asp-Asp-Asp-Lys (SEQ ID NO: 57), Pro-Gly-Ala-Ala-His-Tyr (SEQ ID NO: 58), LPXTG/A consensus motif (SEQ ID NO: 59), Leu-Glu-Val-Phe-Gln-Gly-Pro (SEQ ID NO: 60), Leu-Val-Pro-Arg-Gly-Ser (SEQ ID NO: 61), E-N-L-Y-F-Q-G (SEQ ID NO: 62), and [AGSV]-X (X can be any amino acid; SEQ ID NO: 63).

[0332] In certain embodiments of the foregoing aspects, the heterologous polypeptide is chosen from a cytoplasmic and/or nuclear polypeptide, or a transmembrane polypeptide, e.g., a heterologous polypeptide in Table 2. In some embodiments, the cytoplasmic and/or nuclear polypeptide is selected from the group consisting of a component of the apoptosis pathway (e.g., Caspase 9), a component of a CRISPR/Cas system (e.g., Cas9), a transcription factor (e.g., MITF, c-Myc, STAT3, STAT5, NF-kappaB, beta-catenin, Notch, GLI, or c-JUN), Tet methylcytosine dioxygenase 2 (TET2), FKBP, and Tau. In some embodiments, the transmembrane polypeptide is selected from the group consisting of CD62L, CCR1, CCR2, CCR5, CCR7, CCR10, CXCR2, CXCR3, CXCR4, CXCR6, CTLA4, PD1, BTLA, VISTA, CD137L, CD80, CD86, TIGIT, CD3, CD8, CD19, CD22, CD20, BCMA, and a chimeric antigen receptor (CAR). In some embodiments, the heterologous polypeptide is selected from the group consisting of a chimeric antigen receptor (CAR), a component of a CRISPR/Cas system (e.g., Cas9), CD8, CD19, and CD22.

[0333] In some embodiments, the heterologous polypeptide is a chimeric antigen receptor (CAR). In some embodiments, the CAR comprises, in a N-terminal to C-terminal direction, an antigen binding domain, a transmembrane domain, and one or more intracellular signaling domains. In some embodiments, the intracellular signaling domain comprises one or more primary signaling domains. In some embodiments, the intracellular signaling domain comprises one or more costimulatory signaling domains. In some embodiments, one of the one or more primary signaling domains comprises a CD3-zeta stimulatory domain. In some embodiments, one or more of the costimulatory signaling domains is an intracellular domain from a costimulatory protein selected from the group consisting of CD27, CD28, 4-1BB (CD137), OX40, GITR, CD30, CD40, ICOS, BAFFR, HVEM, ICAM-1, lymphocyte function-associated antigen-1 (LFA-1), CD2, CDS, CD7, CD287, LIGHT, NKG2C, NKG2D, SLAMF7, NKp80, NKp30, NKp44, NKp46, CD160, B7-H3, and a ligand that specifically binds with CD83. In some embodiments, the one or more of said costimulatory signaling domains comprises the 4-1BB costimulatory domain. In some embodiments, the one or more of said costimulatory signaling domains comprises the CD28 costimulatory domain. In some embodiments, the antigen binding domain is an scFv.

[0334] In some embodiments, the antigen binding domain binds an antigen selected from the group consisting of CD19; CD123; CD22; CD30; CD171; CS-1; C-type lectin-like molecule-1, CD33; epidermal growth factor receptor variant III (EGFRvIII); ganglioside G2 (GD2); ganglioside GD3; TNF receptor family member; B-cell maturation antigen; Tn antigen ((Tn Ag) or (GalNAcα-Ser/Thr)); prostate-specific membrane antigen (PSMA); Receptor tyrosine kinase-like orphan receptor 1 (ROR1); Fms-Like Tyrosine Kinase 3 (FLT3); Tumor-associated glycoprotein 72 (TAG72); CD38; CD44v6; Carcinoembryonic antigen (CEA); Epithelial cell adhesion molecule (EPCAM); B7H3 (CD276); KIT (CD117); Interleukin-13 receptor subunit alpha-2; Mesothelin; Interleukin 11 receptor alpha (IL-11Ra); prostate stem cell antigen (PSCA); Protease Serine 21; vascular endothelial growth factor receptor 2 (VEGFR2); Lewis(Y) antigen; CD24; Platelet-derived growth factor receptor beta (PDGFR-beta); Stage-specific embryonic antigen-4 (SSEA-4); CD20; Folate receptor alpha; Receptor tyrosine-protein kinase ERBB2 (Her2/neu); Mucin 1, cell surface associated (MUC1); epidermal growth factor receptor (EGFR); neural cell adhesion molecule (NCAM); Prostase; prostatic acid phosphatase (PAP); elongation factor 2 mutated (ELF2M); Ephrin B2; fibroblast activation protein alpha (FAP); insulin-like growth factor 1 receptor (IGF-I receptor), carbonic anhydrase IX (CAIX); Proteasome (Prosome, Macropain) Subunit, Beta Type, 9 (LMP2); glycoprotein 100 (gp100); oncogene polypeptide consisting of breakpoint cluster region (BCR) and Abelson murine leukemia viral oncogene homolog 1 (Ab1) (bcr-ab1); tyrosinase; ephrin type-A receptor 2 (EphA2); Fucosyl GM1; sialyl Lewis adhesion molecule (sLe); ganglioside GM3; transglutaminase 5 (TGS5); high molecular weight-melanoma-associated antigen (HMWMAA); o-acetyl-GD2 ganglioside (OAcGD2); Folate receptor beta; tumor endothelial marker 1 (TEM1/CD248); tumor endothelial marker 7-related (TEM7R); claudin 6 (CLDN6); thyroid stimulating hormone receptor (TSHR); G protein-coupled receptor class C group 5, member D (GPRC5D); chromosome X open reading frame 61 (CXORF61); CD97; CD179a; anaplastic lymphoma kinase (ALK); Polysialic acid; placenta-specific 1 (PLAC1); hexasaccharide portion of globoH glycoceramide (GloboH); mammary gland differentiation antigen (NY-BR-1); uroplakin 2 (UPK2); Hepatitis A virus cellular receptor 1 (HAVCR1); adrenoceptor beta 3 (ADRB3); pannexin 3 (PANX3); G protein-coupled receptor 20 (GPR20); lymphocyte antigen 6 complex, locus K 9 (LY6K); Olfactory receptor 51E2 (OR51E2); TCR Gamma Alternate Reading Frame Protein (TARP); Wilms tumor protein (WT1); Cancer/testis antigen 1 (NY-ESO-1); Cancer/testis antigen 2 (LAGE-1a); Melanoma-associated antigen 1 (MAGE-A1); ETS translocation-variant gene 6, located on chromosome 12p (ETV6-AML); sperm protein 17 (SPA17); X Antigen Family, Member 1A (XAGE1); angiopoietin-binding cell surface receptor 2 (Tie 2); melanoma cancer testis antigen-1 (MAD-CT-1); melanoma cancer testis antigen-2 (MAD-CT-2); Fos-related antigen 1; tumor protein p53 (p53); p53 mutant; prostein; surviving; telomerase; prostate carcinoma tumor antigen-1, melanoma antigen recognized by T cells 1; Rat sarcoma (Ras) mutant; human Telomerase reverse transcriptase (hTERT); sarcoma translocation breakpoints; melanoma inhibitor of apoptosis (ML-IAP); ERG (transmembrane protease, serine 2 (TMPRSS2) ETS fusion gene); N-Acetyl glucosaminyl-transferase V (NA17); paired box protein Pax-3 (PAX3); Androgen receptor; Cyclin B1; v-myc avian myelocytomatosis viral oncogene neuroblastoma derived homolog (MYCN); Ras Homolog Family Member C (RhoC); Tyrosinase-related protein 2 (TRP-2); Cytochrome P450 1B1 (CYP1B1); CCCTC-Binding Factor (Zinc Finger Protein)-Like, Squamous Cell Carcinoma Antigen Recognized By T Cells 3 (SART3); Paired box protein Pax-5 (PAX5); proacrosin binding protein sp32 (OY-TES1); lymphocyte-specific protein tyrosine kinase (LCK); A kinase anchor protein 4 (AKAP-4); synovial sarcoma, X breakpoint 2 (SSX2); Receptor for Advanced Glycation Endproducts (RAGE-1); renal ubiquitous 1 (RU1); renal ubiquitous 2 (RU2); legumain; human papilloma virus E6 (HPV E6); human papilloma virus E7 (HPV E7); intestinal carboxyl esterase; heat shock protein 70-2 mutated (mut hsp70-2); CD79a; CD79b; CD72; Leukocyte-associated immunoglobulin-like receptor 1 (LAIR1); Fc fragment of IgA receptor (FCAR or CD89); Leukocyte immunoglobulin-like receptor subfamily A member 2 (LILRA2); CD300 molecule-like family member f (CD300LF); C-type lectin domain family 12 member A (CLEC12A); bone marrow stromal cell antigen 2 (BST2); EGF-like module-containing mucin-like hormone receptor-like 2 (EMR2); lymphocyte antigen 75 (LY75); Glypican-3 (GPC3); Fc receptor-like 5 (FCRL5); and immunoglobulin lambda-like polypeptide 1 (IGLL1). In some embodiments, the antigen is chosen from CD19, CD22, BCMA, CD20, CD123, EGFRvIII, or mesothelin. In some embodiments, the antigen is CD19. In some embodiments, the antigen is CD22. In some embodiments, the antigen is BCMA. In some embodiments, the antigen is CD20. In some embodiments, the antigen is CD123. In some embodiments, the antigen is EGFRvIII.

[0335] In one aspect, provided herein is a nucleic acid molecule encoding a fusion polypeptide disclosed herein. In another aspect, provided herein is a vector comprising the nucleic acid molecule. In some embodiments, the vector is a viral vector. In some embodiments, the vector is a lentiviral vector. In another aspect, provided herein is a viral particle comprising the vector.

[0336] In another aspect, provided herein is a cell, e.g., a host cell, comprising a fusion polypeptide disclosed herein, a nucleic acid molecule disclosed herein, or a vector disclosed herein. In some embodiments, the cell, e.g., host cell, is a mammalian cell, e.g., a human cell, e.g., a human effector cell, e.g., a human T cell or a human NK cell.

[0337] In some embodiments, the cell, e.g., host cell, is a CAR-expressing cell, e.g., a CAR-T cell. In some embodiments, the cell, e.g., host cell, comprises a component of a CRISPR/Cas system. In some embodiments, the cell, e.g., host cell, is a human cancer cell, e.g., a human tumor cell.

[0338] In some embodiments, the cell, e.g., host cell, comprises a ubiquitin ligase complex, e.g., an E3 ubiquitin ligase complex, wherein the ubiquitin ligase complex comprises CRBN.

[0339] In some embodiments, the cell comprises a fusion polypeptide disclosed herein (e.g., a fusion polypeptide comprising a COF1/CRBN-binding polypeptide and a heterologous polypeptide), wherein when the cell is contacted with COF1, e.g., an excess of COF1:
[0340] i) the association of the COF1/CRBN-binding polypeptide with CRBN is increased by at least, e.g., 10-, 50-, 100-, 1000-, or 10000-fold, compared to the association of the COF1/CRBN-binding polypeptide with CRBN when the cell is not contacted with COF1, e.g., as measured by an assay described herein, e.g., immunoprecipitation;
[0341] ii) the association of the fusion polypeptide with CRBN is increased by at least, e.g., 10-, 50-, 100-, 1000-, or 10000-fold, compared to the association of the fusion polypeptide with CRBN when the cell is not contacted with COF1, e.g., as measured by an assay described herein, e.g., immunoprecipitation;
[0342] iii) the ubiquitination of the heterologous polypeptide is increased by at least, e.g., 1.5-, 2-, 3-, 4-, 5-, 10-, 20-, 30-, 40-, or 50-fold, compared to the ubiquitination of the heterologous polypeptide when the cell is not contacted with COF1, e.g., as measured by an assay described herein;
[0343] iv) the ubiquitination of the fusion polypeptide is increased by at least, e.g., 1.5-, 2-, 3-, 4-, 5-, 10-, 20-, 30-, 40-, or 50-fold, compared to the ubiquitination of the fusion polypeptide when the cell is not contacted with COF1, e.g., as measured by an assay described herein;
[0344] v) the degradation of the fusion polypeptide is increased by at least, e.g., 1.5-, 2-, 3-, 4-, 5-, 10-, 20-, 30-, 40-, or 50-fold, compared to the degradation of the fusion polypeptide when the cell is not contacted with COF1, e.g., as measured by an assay described herein, e.g., a Western blot analysis or a flow cytometry analysis; or
[0345] vi) the expression level of the fusion polypeptide is no more than, e.g., 0.01%, 0.1%, 1%, 10%, 20%, 30%, 40%, 50%, 60%, or 70%, of the expression level of the fusion polypeptide when the cell is not contacted with COF1, e.g., as measured by an assay described herein, e.g., a Western blot analysis or a flow cytometry analysis.

[0346] In some embodiments, the cell further comprises COF1, e.g., lenalidomide or pomalidomide, or a pharmaceutically acceptable salt thereof.

[0347] In some embodiments, the cell comprises a fusion polypeptide disclosed herein (e.g., a fusion polypeptide comprising a COF3/CRBN-binding polypeptide and a heterologous polypeptide), wherein when the cell is contacted with COF3, e.g., an excess of COF3:
[0348] i) the association of the COF3/CRBN-binding polypeptide with CRBN is increased by at least, e.g., 10-, 50-, 100-, 1000-, or 10000-fold, compared to the association of the COF3/CRBN-binding polypeptide with CRBN when the cell is not contacted with COF3, e.g., as measured by an assay described herein, e.g., immunoprecipitation;
[0349] ii) the association of the fusion polypeptide with CRBN is increased by at least, e.g., 10-, 50-, 100-, 1000-, or 10000-fold, compared to the association of the fusion polypeptide with CRBN when the cell is not contacted with COF3, e.g., as measured by an assay described herein, e.g., immunoprecipitation;
[0350] iii) the ubiquitination of the heterologous polypeptide is increased by at least, e.g., 1.5-, 2-, 3-, 4-, 5-, 10-, 20-, 30-, 40-, or 50-fold, compared to the ubiquitination of the heterologous polypeptide when the cell is not contacted with COF3, e.g., as measured by an assay described herein;
[0351] iv) the ubiquitination of the fusion polypeptide is increased by at least, e.g., 1.5-, 2-, 3-, 4-, 5-, 10-, 20-, 30-, 40-, or 50-fold, compared to the ubiquitination of the fusion polypeptide when the cell is not contacted with COF3, e.g., as measured by an assay described herein;
[0352] v) the degradation of the fusion polypeptide is increased by at least, e.g., 1.5-, 2-, 3-, 4-, 5-, 10-, 20-, 30-, 40-, or 50-fold, compared to the degradation of the fusion polypeptide when the cell is not contacted with COF3, e.g., as measured by an assay described herein, e.g., a Western blot analysis or a flow cytometry analysis; or
[0353] vi) the expression level of the fusion polypeptide is no more than, e.g., 0.01%, 0.1%, 1%, 10%, 20%, 30%, 40%, 50%, 60%, or 70%, of the expression level of the fusion polypeptide when the cell is not contacted with COF3, e.g., as measured by an assay described herein, e.g., a Western blot analysis or a flow cytometry analysis.

[0354] In some embodiments, the cell further comprises COF3, e.g., a compound disclosed in Table 29, or a pharmaceutically acceptable salt thereof.

[0355] In some embodiments, the cell comprises a fusion polypeptide disclosed herein (e.g., a fusion polypeptide comprising a COF1/CRBN-, COF2/CRBN-, or COF3/CRBN-binding polypeptide, a heterologous polypeptide, and a degradation domain), wherein in the absence of a stabilization compound, the fusion polypeptide is degraded by a cellular degradation pathway, e.g., at least 50%, 60%, 70%, 80%, 90% or greater of the fusion polypeptide is degraded, e.g., as measured by an assay described herein, e.g., a Western blot analysis or a flow cytometry analysis.

[0356] In some embodiments, the fusion polypeptide further comprises a heterologous protease cleavage site. In some embodiments, the cell further comprises a protease capable of cleaving the heterologous protease cleavage site.

[0357] In some embodiments, the cell comprises a fusion polypeptide disclosed herein (e.g., a fusion polypeptide comprising a COF1/CRBN-, COF2/CRBN-, or COF3/CRBN-binding polypeptide, a heterologous polypeptide, and a degradation domain), wherein when the cell is contacted with a stabilization compound, e.g., an excess of a stabilization compound:
[0358] i) the degradation domain assumes a conformation more resistant to cellular degradation relative to a conformation in the absence of the stabilization compound;
[0359] ii) the conformation of the fusion polypeptide is more permissive to cleavage at the heterologous protease cleavage site relative to a conformation in the absence of the stabilization compound; or
[0360] iii) the expression level of the fusion polypeptide is increased by at least, e.g., 1.5-, 2-, 3-, 4-, 5-, 10-, 20-, 30-, 40-, or 50-fold, compared to the expression level of the fusion polypeptide when the cell is not contacted with the stabilization compound, e.g., as measured by an assay described herein, e.g., a Western blot analysis or a flow cytometry analysis.

[0361] In some embodiments, the cell further comprises a stabilization compound. In some embodiments, the stabilization compound is bazedoxifene, or a pharmaceutically acceptable salt thereof. In some embodiments, the degradation domain comprises the amino acid sequence of SEQ ID NO: 46.

[0362] In some embodiments, the cell comprises a fusion polypeptide disclosed herein (e.g., a fusion polypeptide comprising a COF1/CRBN-, COF2/CRBN-, or COF3/CRBN-binding polypeptide, a heterologous polypeptide, and a degradation domain), wherein when the cell is contacted with both a stabilization compound, e.g., an excess of a stabilization compound, and COF1, COF2, or COF3, e.g., an excess of COF1, COF2, or COF3:
[0363] i) the association of the COF1/CRBN-, COF2/CRBN-, or COF3/CRBN-binding polypeptide with CRBN is increased by at least, e.g., 10, 50, 100, 1000, or 10000 fold, compared to the association of the COF1/CRBN-, COF2/CRBN-, or COF3/CRBN-binding polypeptide with CRBN when the cell is only contacted with the stabilization compound but not COF1, COF2, or COF3, e.g., as measured by an assay described herein, e.g., immunoprecipitation;
[0364] ii) the association of the fusion polypeptide with CRBN is increased by at least, e.g., 10-, 50-, 100-, 1000-, or 10000-fold, compared to the association of the fusion polypeptide with CRBN when the cell is only contacted with the stabilization compound but not COF1, COF2, or COF3, e.g., as measured by an assay described herein, e.g., immunoprecipitation;
[0365] iii) the ubiquitination of the heterologous polypeptide is increased by at least, e.g., 1.5-, 2-, 3-, 4-, 5-, 10-, 20-, 30-, 40-, or 50-fold, compared to the ubiquitination of the heterologous polypeptide when the cell is only contacted with the stabilization compound but not COF1, COF2, or COF3, e.g., as measured by an assay described herein;
[0366] iv) the ubiquitination of the fusion polypeptide is increased by at least, e.g., 1.5-, 2-, 3-, 4-, 5-, 10-, 20-, 30-, 40-, or 50-fold, compared to the ubiquitination of the fusion polypeptide when the cell is only contacted with the stabilization compound but not COF1, COF2, or COF3, e.g., as measured by an assay described herein;
[0367] v) the degradation of the fusion polypeptide is increased by at least, e.g., 1.5-, 2-, 3-, 4-, 5-, 10-, 20-, 30-, 40-, or 50-fold, compared to the degradation of the fusion polypeptide when the cell is only contacted with the stabilization compound but not COF1, COF2, or COF3, e.g., as measured by an assay described herein, e.g., a Western blot analysis or a flow cytometry analysis; or
[0368] vi) the expression level of the fusion polypeptide is no more than, e.g., 0.01%, 0.1%, 1%, 10%, 20%, 30%, 40%, 50%, 60%, or 70%, of the expression level of the fusion polypeptide when the cell is only contacted with the stabilization compound but not COF1, COF2, or COF3, e.g., as measured by an assay described herein, e.g., a Western blot analysis or a flow cytometry analysis.

[0369] In some embodiments, the cell further comprises COF1 (e.g., lenalidomide or pomalidomide, or a pharmaceutically acceptable salt thereof), COF2 (e.g., lenalidomide or pomalidomide, or a pharmaceutically acceptable salt thereof), or COF3 (a compound disclosed in Table 29, or a pharmaceutically acceptable salt thereof).

[0370] In some embodiments, the heterologous polypeptide is a chimeric antigen receptor (CAR), optionally wherein the CAR comprises, in a N-terminal to C-terminal direction, an antigen binding domain, a transmembrane domain, and one or more intracellular signaling domains.

[0371] In one aspect, disclosed herein is a pharmaceutical composition comprising a fusion polypeptide disclosed herein or a cell disclosed herein, and a pharmaceutically acceptable carrier, excipient or stabilizer.

[0372] In one aspect, disclosed herein is a method of making a cell disclosed herein.

[0373] In one aspect, disclosed herein is a method of degrading a fusion polypeptide disclosed herein (e.g., a fusion polypeptide comprising a COF1/CRBN-binding polypeptide and a heterologous polypeptide (e.g., a CAR polypeptide)), comprising contacting the fusion polypeptide or a cell comprising said fusion polypeptide with COF1 (e.g., lenalidomide or pomalidomide, or a pharmaceutically acceptable salt thereof). In some embodiments, in the presence of COF1 (e.g., lenalidomide or pomalidomide, or a pharmaceutically acceptable salt thereof), the expression level of said fusion polypeptide is substantially decreased, e.g., by at least about 1, 2, 3, 4, 5, 6, 7, 8, 9, 10, 20, 30, 40, 50, 60, 70, 80, 90, or 100 percent, relative to the expression level of said fusion polypeptide in the absence of COF1 (e.g., lenalidomide or pomalidomide, or a pharmaceutically acceptable salt thereof), e.g., as measured by an assay described herein, e.g., a Western blot analysis or a flow cytometry analysis. In some embodiments, the fusion polypeptide or the cell is contacted with COF1 (e.g., lenalidomide or pomalidomide, or a pharmaceutically acceptable salt thereof) ex vivo. In some embodiments, the fusion polypeptide or the cell is contacted with COF1 (e.g., lenalidomide or pomalidomide, or a pharmaceutically acceptable salt thereof) in vivo.

[0374] In one aspect, disclosed herein is a method of regulating the expression of a fusion polypeptide disclosed herein (e.g., a fusion polypeptide comprising a COF1/CRBN- or COF2/CRBN-binding polypeptide, a heterologous polypeptide (e.g., a CAR polypeptide), and a degradation domain), comprising:
[0375] i) contacting the fusion polypeptide or a cell comprising the fusion polypeptide with a stabilization compound, optionally wherein in the presence of the stabilization compound:
[0376] a) the degradation domain assumes a conformation more resistant to cellular degradation relative to a conformation in the absence of the stabilization compound;
[0377] b) the conformation of the fusion polypeptide is more permissive to cleavage at the heterologous protease cleavage site relative to a conformation in the absence of the stabilization compound; or
[0378] c) the expression level of the fusion polypeptide is increased by at least, e.g., 1.5-, 2-, 3-, 4-, 5-, 10-, 20-, 30-, 40-, or 50-fold, compared to the expression level of the fusion polypeptide in the absence of the stabilization compound, e.g., as measured by an assay described herein, e.g., a Western blot analysis or a flow cytometry analysis.

[0379] In some embodiments, the method further comprises, after step i):
[0380] ii) contacting the fusion polypeptide or a cell comprising the fusion polypeptide with COF1 (e.g., lenalidomide or pomalidomide, or a pharmaceutically acceptable salt thereof) or COF2 (e.g., lenalidomide or pomalidomide, or a pharmaceutically acceptable salt thereof), optionally wherein in the presence of COF1 or COF2, the expression level of the fusion polypeptide is substantially decreased, e.g., by at least about 1, 2, 3, 4, 5, 6, 7, 8, 9, 10, 20, 30, 40, 50, 60, 70, 80, 90, or 100 percent, relative to the expression level of the fusion polypeptide after step i) and before step ii), e.g., as measured by an assay described herein, e.g., a Western blot analysis or a flow cytometry analysis.

[0381] In some embodiments, the stabilization compound is bazedoxifene, or a pharmaceutically acceptable salt thereof. In some embodiments, the degradation domain comprises the amino acid sequence of SEQ ID NO: 46.

[0382] In some embodiments, the fusion polypeptide or the cell is contacted with COF1 or COF2 (e.g., lenalidomide or pomalidomide, or a pharmaceutically acceptable salt thereof) and/or the stabilization compound ex vivo. In some embodiments, the fusion polypeptide or the cell is contacted with COF1 or COF2 (e.g., lenalidomide or pomalidomide, or a pharmaceutically acceptable salt thereof) and/or the stabilization compound in vivo.

[0383] In some embodiments, the heterologous polypeptide is a chimeric antigen receptor (CAR). In some embodiments, the CAR comprises, in a N-terminal to C-terminal direction, an antigen binding domain, a transmembrane domain, and one or more intracellular signaling domains.

[0384] In one aspect, disclosed herein is a method of making a cell, comprising:
[0385] i) providing a cell comprising a nucleic acid molecule encoding a fusion polypeptide comprising a compound of formula 1 (COF1)/CRBN-binding polypeptide and a chimeric antigen receptor (CAR), optionally wherein the CAR comprises, in a N-terminal to C-terminal direction, an antigen binding domain, a transmembrane domain, and one or more intracellular signaling domains; and
[0386] ii) contacting the cell ex vivo with COF1, optionally wherein:
[0387] in the presence of COF1, the expression level of the fusion polypeptide is substantially decreased, e.g., by at least about 1, 2, 3, 4, 5, 6, 7, 8, 9, 10, 20, 30, 40, 50, 60, 70, 80, 90, or 100 percent, relative to the expression level of the fusion polypeptide in the absence of COF1, e.g., as measured by an assay described herein, e.g., a Western blot analysis or a flow cytometry analysis, wherein the compound of Formula (I) is:

[chemical structure]

or a pharmaceutically acceptable salt, ester, hydrate, solvate, or tautomer thereof, wherein:
[0388] X is O or S;
[0389] R¹ is C₁-C₆ alkyl, C₂-C₆ alkenyl, C₂-C₆ alkynyl, C₁-C₆ heteroalkyl, carbocyclyl, heterocyclyl, aryl, or heteroaryl, each of which is independently and optionally substituted by one or more R⁴;
[0390] each of R^{2a} and R^{2b} is independently hydrogen or C₁-C₆ alkyl; or R^{2a} and R^{2b} together with the carbon atom to which they are attached form a carbonyl group or a thiocarbonyl group;
[0391] each of R³ is independently C₁-C₆ alkyl, C₂-C₆ alkenyl, C₂-C₆ alkynyl, C₁-C₆ heteroalkyl, halo, cyano, —C(O)R^{A}, —C(O)OR^{B}, —OR^{B}, —N(R^{C})(R^{D}), —C(O)N(R^{C})(R^{D}), —N(R^{C})C(O)R^{A}, —S(O)ₓR^{E}, —S(O)ₓN(R^{C})(R^{D}), or —N(R^{C})S(O)ₓR^{E}, wherein each alkyl, alkenyl, alkynyl, and heteroalkyl is independently and optionally substituted with one or more R⁶.
[0392] each R⁴ is independently C₁-C₆ alkyl, C₂-C₆ alkenyl, C₂-C₆ alkynyl, C₁-C₆ heteroalkyl, halo, cyano, oxo, —C(O)R^{A}, —C(O)OR^{B}, —OR^{B}, —N(R^{C})(R^{D}), —C(O)N(R^{C})(R^{D}), —N(R^{C})C(O)R^{A}, —S(O)ₓR^{E}, —S(O)ₓN(R^{C})(R^{D}), —N(R^{C})S(O)ₓR^{E}, carbocyclyl, heterocyclyl, aryl, or heteroaryl, wherein each alkyl, alkenyl, alkynyl, heteroalkyl, carbocyclyl, heterocyclyl, aryl, and heteroaryl is independently and optionally substituted with one or more R⁷;
[0393] each of R^{A}, R^{B}, R^{C}, R^{D}, and R^{E} is independently hydrogen or C₁-C₆ alkyl;
[0394] each R⁶ is independently C₁-C₆ alkyl, oxo, cyano, —OR^{B}, —N(R^{C})(R^{D}), —C(O)N(R^{C})(R^{D}), —N(R^{C})C(O)R^{A}, aryl, or heteroaryl, wherein each aryl and heteroaryl is independently and optionally substituted with one or more R⁸;
[0395] each R⁷ is independently halo, oxo, cyano, —OR^{B}, —N(R^{C})(R^{D}), —C(O)N(R^{C})(R^{D}), or —N(R^{C})C(O)R^{A};
[0396] each R⁸ is independently C₁-C₆ alkyl, cyano, —OR^{B}, —N(R^{C})(R^{D}), —C(O)N(R^{C})(R^{D}), or —N(R^{C})C(O)R^{A};
[0397] n is 0, 1, 2, 3 or 4; and
[0398] x is 0, 1, or 2.

[0399] In some embodiments, after the cell is contacted with COF1 ex vivo, the proliferation of the cell is increased by at least, e.g., 1.2-, 1.5-, 2-, 5-, or 10-fold, relative to the proliferation of the cell prior to the contacting with COF1. In some embodiments, COF1 is lenalidomide or pomalidomide, or a pharmaceutically acceptable salt thereof. In some embodiments, the COF1/CRBN-binding polypeptide comprises or consists of an amino acid sequence selected from the group consisting of SEQ ID NOs: 1-6, 11-15, 40, 41-43, 77, 78, 84-86, and 100 (e.g., the COF1/CRBN-binding polypeptide comprises or consists of the amino acid sequence of SEQ ID NO: 3).

[0400] In one aspect, provided herein is a method of treating a subject having a disease associated with expression of a tumor antigen, comprising:
[0401] i) contacting a cell disclosed herein (e.g., a cell comprising a fusion polypeptide comprising a COF1/CRBN-binding polypeptide and a heterologous polypeptide (e.g., a CAR polypeptide)) with COF1 ex vivo, optionally wherein:
[0402] in the presence of COF1, the expression level of the fusion polypeptide is decreased, e.g., by at least about 1, 2, 3, 4, 5, 6, 7, 8, 9, 10, 20, 30, 40, 50, 60, 70, 80, 90, or 100 percent, relative to the expression level of the fusion polypeptide before the cell is contacted with COF1 ex vivo, and
[0403] ii) administering to the subject an effective amount of the cell, optionally wherein the method further comprises after step i) and prior to step ii):
[0404] reducing the amount of COF1 contacting the cell, e.g., inside and/or surrounding the cell, thereby treating the disease.

[0405] In some embodiments, the method further comprises after step ii):
[0406] iii) administering to the subject an effective amount of COF1, optionally wherein the administration of COF1 decreases, e.g., by at least about 1, 2, 3, 4, 5, 6, 7, 8, 9, 10, 20, 30, 40, 50, 60, 70, 80, 90, or 100 percent, the expression level of the fusion polypeptide relative to the expression level of the fusion polypeptide after step ii) and prior to step iii), optionally wherein:
[0407] a) the subject has developed, is developing, or is anticipated to develop an adverse reaction,
[0408] b) the administration of COF1 is in response to an occurrence of an adverse reaction in the subject, or in response to an anticipation of an occurrence of an adverse reaction in the subject, and/or
[0409] c) the administration of COF1 reduces or prevents an adverse effect.

[0410] In some embodiments, the method further comprises after step iii):
[0411] iv) discontinuing the administration of COF1, optionally wherein discontinuing the administration of COF1 increases, e.g., by at least about 1.5-, 2-, 3-, 4-, 5-, 10-, 20-, 30-, 40-, or 50-fold, the expression level of the fusion polypeptide relative to the expression level of the fusion polypeptide after step iii) and prior to step iv) (e.g., wherein discontinuing the administration of COF1 restores the expression level of the fusion polypeptide to the expression level after step ii) and prior to step iii)), optionally wherein:
[0412] a) the subject has relapsed, is relapsing, or is anticipated to relapse,
[0413] b) the discontinuation of the administration of COF1 is in response to a tumor relapse in the subject, or in response to an anticipation of a relapse in the subject, and/or
[0414] c) the discontinuation of the administration of COF1 treats or prevents a tumor relapse.

[0415] In some embodiments, the method further comprises after step iv):
[0416] v) repeating step iii) and/or iv),
   thereby treating the disease.

[0417] In some embodiments, COF1 is lenalidomide or pomalidomide, or a pharmaceutically acceptable salt thereof, optionally wherein the COF1/CRBN-binding polypeptide comprises or consists of an amino acid sequence selected from the group consisting of SEQ ID NOs: 1-6, 11-15, 40, 41-43, 77, 78, 84-86, and 100 (e.g., the COF1/CRBN-binding polypeptide comprises or consists of the amino acid sequence of SEQ ID NO: 3). In some embodiments, COF1 is lenalidomide, or a pharmaceutically acceptable salt thereof, optionally wherein lenalidomide, or a pharmaceutically acceptable salt thereof, is administered at, e.g., 2.5 mg, 5 mg, 10 mg, 15 mg, or 25 mg per day.

[0418] In one aspect, provided herein is a method of treating a subject having a disease associated with expression of a tumor antigen, comprising:
[0419] i) administering to the subject an effective amount of a cell disclosed herein (e.g., a cell comprising a fusion polypeptide comprising a COF1/CRBN-binding polypeptide and a heterologous polypeptide (e.g., a CAR polypeptide)), optionally wherein the cell is contacted with COF1 ex vivo before administration, optionally wherein:
[0420] in the presence of COF1, the expression level of the fusion polypeptide is decreased, e.g., by at least about 1, 2, 3, 4, 5, 6, 7, 8, 9, 10, 20, 30, 40, 50, 60, 70, 80, 90, or 100 percent, relative to the expression level of the fusion polypeptide before the cell is contacted with COF1 ex vivo, optionally wherein after the cell is contacted with COF1 ex vivo and before the cell is administered to the subject, the amount of COF1 contacting the cell, e.g., inside and/or surrounding the cell, is reduced, thereby treating the disease.

[0421] In some embodiments, the cell is not contacted with COF1 ex vivo before administration.

[0422] In some embodiments, the method further comprises after step i):
[0423] ii) administering to the subject an effective amount of COF1, optionally wherein the administration of COF1 decreases, e.g., by at least about 1, 2, 3, 4, 5, 6, 7, 8, 9, 10, 20, 30, 40, 50, 60, 70, 80, 90, or 100 percent, the expression level of the fusion polypeptide relative to the expression level of the fusion polypeptide after step i) and prior to step ii), optionally wherein:
[0424] a) the subject has developed, is developing, or is anticipated to develop an adverse reaction,
[0425] b) the administration of COF1 is in response to an occurrence of an adverse reaction in the subject, or in response to an anticipation of an occurrence of an adverse reaction in the subject, and/or
[0426] c) the administration of COF1 reduces or prevents an adverse effect.

[0427] In some embodiments, the method further comprises after step ii):
[0428] iii) discontinuing the administration of COF1, optionally wherein discontinuing the administration of COF1 increases, e.g., by at least about 1.5-, 2-, 3-, 4-, 5-, 10-, 20-, 30-, 40-, or 50-fold, the expression level of the fusion polypeptide relative to the expression level of the fusion polypeptide after step ii) and prior to step iii) (e.g., wherein discontinuing the administration of COF1 restores the expression level of the fusion polypeptide to the expression level after step i) and prior to step ii)), optionally wherein:
[0429] a) the subject has relapsed, is relapsing, or is anticipated to relapse,
[0430] b) the discontinuation of the administration of COF1 is in response to a tumor relapse in the subject, or in response to an anticipation of a relapse in the subject, and/or
[0431] c) the discontinuation of the administration of COF1 treats or prevents a tumor relapse.

[0432] In some embodiments, the method further comprises after step iii):
[0433] iv) repeating step ii) and/or iii),
[0434] thereby treating the disease.

[0435] In some embodiments, COF1 is lenalidomide or pomalidomide, or a pharmaceutically acceptable salt thereof, optionally wherein the COF1/CRBN-binding polypeptide comprises or consists of an amino acid sequence selected from the group consisting of SEQ ID NOs: 1-6, 11-15, 40, 41-43, 77, 78, 84-86, and 100 (e.g., the COF1/CRBN-binding polypeptide comprises or consists of the amino acid sequence of SEQ ID NO: 3). In some embodiments, COF1 is lenalidomide, or a pharmaceutically acceptable salt thereof, optionally wherein lenalidomide, or a pharmaceutically acceptable salt thereof, is administered at, e.g., 2.5 mg, 5 mg, 10 mg, 15 mg, or 25 mg per day.

[0436] In one aspect, provided herein is a method of treating a subject having a disease associated with expression of a tumor antigen, comprising:
[0437] i) administering an effective amount of COF1 to the subject, wherein the subject comprises a cell disclosed herein (e.g., a cell comprising a fusion polypeptide comprising a COF1/CRBN-binding polypeptide and a heterologous polypeptide (e.g., a CAR polypeptide)), optionally wherein the administration of COF1 decreases, e.g., by at least about 1, 2, 3, 4, 5, 6, 7, 8, 9, 10, 20, 30, 40, 50, 60, 70, 80, 90, or 100 percent, the expression level of the fusion polypeptide relative to the expression level of the fusion polypeptide before the administration of COF1, optionally wherein:
[0438] a) the subject has developed, is developing, or is anticipated to develop an adverse reaction,
[0439] b) the administration of COF1 is in response to an occurrence of an adverse reaction in the subject, or in response to an anticipation of an occurrence of an adverse reaction in the subject, and/or
[0440] c) the administration of COF1 reduces or prevents an adverse effect.

[0441] In some embodiments, the method further comprises after step i):
[0442] ii) discontinuing the administration of COF1, optionally wherein discontinuing the administration of COF1 increases, e.g., by at least about 1.5-, 2-, 3-, 4-, 5-, 10-, 20-, 30-, 40-, or 50-fold, the expression level of the fusion polypeptide relative to the expression level of the fusion polypeptide after step i) and prior to step ii) (e.g., wherein discontinuing the administration of COF1 restores the expression level of the fusion polypeptide to the expression level before the administration of COF1), optionally wherein:
[0443] a) the subject has relapsed, is relapsing, or is anticipated to relapse,
[0444] b) the discontinuation of the administration of COF1 is in response to a tumor relapse in the subject, or in response to an anticipation of a relapse in the subject, and/or
[0445] c) the discontinuation of the administration of COF1 treats or prevents a tumor relapse.

[0446] In some embodiments, the method further comprises after step ii):
[0447] iii) repeating step i) and/or ii),
[0448] thereby treating the disease.

[0449] In some embodiments, COF1 is lenalidomide or pomalidomide, or a pharmaceutically acceptable salt thereof, optionally wherein the COF1/CRBN-binding polypeptide comprises or consists of an amino acid sequence selected from the group consisting of SEQ ID NOs: 1-6, 11-15, 40, 41-43, 77, 78, 84-86, and 100 (e.g., the COF1/CRBN-binding polypeptide comprises or consists of the amino acid sequence of SEQ ID NO: 3). In some embodiments, COF1 is lenalidomide, or a pharmaceutically acceptable salt thereof, optionally wherein lenalidomide, or a pharmaceutically acceptable salt thereof, is administered at, e.g., 2.5 mg, 5 mg, 10 mg, 15 mg, or 25 mg per day.

[0450] In one aspect, provided herein is a method of treating a subject having a disease associated with expression of a tumor antigen, comprising:
[0451] i) administering to the subject:
[0452] (1) a stabilization compound, and
[0453] (2) an effective amount of a cell disclosed herein (e.g., a cell comprising a fusion polypeptide comprising a COF1/CRBN- or COF2/CRBN-binding polypeptide, a heterologous polypeptide (e.g., a CAR polypeptide), and a degradation domain), optionally wherein:
[0454] the expression level of the fusion polypeptide in the presence of the stabilization compound is e.g., at least about 1.5-, 2-, 3-, 4-, 5-, 10-, 20-, 30-, 40-, or 50-fold, higher than the expression level of the fusion polypeptide in the absence of the stabilization compound,
[0455] thereby treating the disease.

[0456] In some embodiments, the method further comprises after step i):
[0457] ii) discontinuing the administration of the stabilization compound, optionally wherein discontinuing the administration of the stabilization compound reduces, e.g., at least about 1.5-, 2-, 3-, 4-, 5-, 10-, 20-, 30-, 40-, or 50-fold, the expression level of the fusion polypeptide relative to the expression of the fusion polypeptide after step i) and prior to step ii), optionally wherein:
[0458] a) the subject responded to the treatment of step i) (e.g., the subject has a complete response to the treatment of step i), the subject shows a shrinkage in tumor mass, the subject shows a decrease in tumor cells, or the treatment of step i) is effective in the subject), and/or
[0459] b) the discontinuation of the administration of the stabilization compound is in response to a response of the subject to the treatment of step i) (e.g., the subject has a complete response to the treatment of step i), the subject shows a shrinkage in tumor mass, the subject shows a decrease in tumor cells, or the treatment of step i) is effective in the subject).

[0460] In some embodiments, the method further comprises after step i):
[0461] iii) discontinuing the administration of the stabilization compound, optionally wherein discontinuing the administration of the stabilization compound reduces, e.g., at least about 1.5-, 2-, 3-, 4-, 5-, 10-, 20-, 30-, 40-, or 50-fold, the expression level of the fusion polypeptide relative to the expression of the fusion polypeptide after step i) and prior to step ii), optionally wherein:
[0462] a) the subject has developed, is developing, or is anticipated to develop an adverse reaction,
[0463] b) the discontinuation of the administration of the stabilization compound is in response to an occurrence of an adverse reaction in the subject, or in response to an anticipation of an occurrence of an adverse reaction in the subject, and/or
[0464] c) the discontinuation of the administration of the stabilization compound reduces or prevents an adverse effect.

[0465] In some embodiments, the method further comprises after step i):
[0466] iv) discontinuing the administration of the stabilization compound and administering to the subject an effective amount of COF1 or COF2, optionally wherein step iv) reduces, e.g., at least about 1.5-, 2-, 3-, 4-, 5-, 10-, 20-, 30-, 40-, or 50-fold, the expression level of the fusion polypeptide relative to the expression of the fusion polypeptide after step i) and prior to step iv), optionally wherein:
[0467] a) the subject has developed, is developing, or is anticipated to develop an adverse reaction,
[0468] b) step iv) is in response to an occurrence of an adverse reaction in the subject, or in response to an anticipation of an occurrence of an adverse reaction in the subject, and/or
[0469] c) step iv) reduces or prevents an adverse effect. In some embodiments, the adverse effect is an acute toxicity.

[0470] In some embodiments, the method further comprises after step iv):
[0471] v) discontinuing the administration of COF1 or COF2, e.g., after the amount of cells expressing the fusion polypeptide on the surface is smaller than a pre-defined value, for, e.g., 1 day, 5 days, 10 days, or 15 days.

[0472] In some embodiments, the method further comprises after step ii), iii), iv), or v):
[0473] vi) administering an effective amount of a stabilization compound, optionally wherein the administration of the stabilization compound increases, e.g., by at least about 1.5-, 2-, 3-, 4-, 5-, 10-, 20-, 30-, 40-, or 50-fold, the expression level of the fusion polypeptide relative to the expression level of the fusion polypeptide after step ii), iii), iv), or v) and prior to step vi), optionally wherein:
[0474] a) the subject has relapsed, is relapsing, or is anticipated to relapse,
[0475] b) the administration of the stabilization compound is in response to a tumor relapse in the subject, or in response to an anticipation of a relapse in the subject, and/or
[0476] c) the administration of the stabilization compound treats or prevents a tumor relapse.

[0477] In some embodiments, the method further comprises after step vi):
[0478] vii) repeating step iii), iv), v), or vi),
[0479] thereby treating the disease.

[0480] In some embodiments, the method further comprises prior to step i):
[0481] viii) contacting the cell with a stabilization compound ex vivo, optionally wherein the expression level of the fusion polypeptide in the presence of the stabilization compound is e.g., at least about 1.5-, 2-, 3-, 4-, 5-, 10-, 20-, 30-, 40-, or 50-fold, higher than the expression level of the fusion polypeptide in the absence of the stabilization compound.

[0482] In some embodiments, the cell is not contacted with the stabilization compound ex vivo before administration. In some embodiments, the cell is not contacted with any of: the stabilization compound, COF1, or COF2 ex vivo before administration.

[0483] In some embodiments, the stabilization compound is bazedoxifene, or a pharmaceutically acceptable salt thereof, and optionally wherein the degradation domain comprises the amino acid sequence of SEQ ID NO: 46.

[0484] In some embodiments, COF1 is lenalidomide or pomalidomide, or a pharmaceutically acceptable salt thereof, optionally wherein the COF1/CRBN-binding polypeptide comprises or consists of an amino acid sequence selected from the group consisting of SEQ ID NOs: 1-6, 11-15, 40, 41-43, 77, 78, 84-86, and 100 (e.g., the COF1/CRBN-binding polypeptide comprises or consists of the amino acid sequence of SEQ ID NO: 3).

[0485] In some embodiments, COF2 is lenalidomide or pomalidomide, or a pharmaceutically acceptable salt thereof, optionally wherein the COF2/CRBN-binding polypeptide comprises or consists of an amino acid sequence selected from the group consisting of SEQ ID NOs: 1-6, 11-15, 40, 41-43, 77, 78, 84-86, and 100 (e.g., the COF1/CRBN-binding polypeptide comprises or consists of the amino acid sequence of SEQ ID NO: 3).

[0486] In some embodiments, COF1 or COF2 is lenalidomide, or a pharmaceutically acceptable salt thereof, optionally wherein lenalidomide, or a pharmaceutically acceptable salt thereof, is administered at, e.g., 2.5 mg, 5 mg, 10 mg, 15 mg, or 25 mg per day.

[0487] In one aspect, disclosed herein is a method of degrading a fusion polypeptide disclosed herein (e.g., a fusion polypeptide comprising a COF3/CRBN-binding polypeptide and a heterologous polypeptide (e.g., a CAR polypeptide)), comprising contacting the fusion polypeptide or a cell comprising said fusion polypeptide with COF3 (e.g., a compound disclosed in Table 29, or a pharmaceutically acceptable salt thereof). In one embodiment, in the presence of COF3, the expression level of said fusion polypeptide is substantially decreased, e.g., by at least about 1, 2, 3, 4, 5, 6, 7, 8, 9, 10, 20, 30, 40, 50, 60, 70, 80, 90, or 100 percent, relative to the expression level of said fusion polypeptide in the absence of COF3, e.g., as measured by an assay described herein, e.g., a Western blot analysis or a flow cytometry analysis. In one embodiment, the fusion polypeptide or the cell is contacted with COF3 ex vivo. In one embodiment, the fusion polypeptide or the cell is contacted with COF3 in vivo.

[0488] In one aspect, disclosed herein is a method of regulating the expression of a fusion polypeptide disclosed herein (e.g., a fusion polypeptide comprising a COF3/CRBN-binding polypeptide, a heterologous polypeptide (e.g., a CAR polypeptide), and a degradation domain), comprising:
[0489] i) contacting the fusion polypeptide or a cell comprising the fusion polypeptide with a stabilization compound, optionally wherein in the presence of the stabilization compound:
[0490] a) the degradation domain assumes a conformation more resistant to cellular degradation relative to a conformation in the absence of the stabilization compound;
[0491] b) the conformation of the fusion polypeptide is more permissive to cleavage at the heterologous protease cleavage site relative to a conformation in the absence of the stabilization compound; or
[0492] c) the expression level of the fusion polypeptide is increased by at least, e.g., 1.5-, 2-, 3-, 4-, 5-, 10-, 20-, 30-, 40-, or 50-fold, compared to the expression level of the fusion polypeptide in the absence of the stabilization compound, e.g., as measured by an assay described herein, e.g., a Western blot analysis or a flow cytometry analysis.

[0493] In some embodiments, the method further comprises, after step i):
[0494] ii) contacting the fusion polypeptide or a cell comprising the fusion polypeptide with COF3 (e.g., a compound disclosed in Table 29, or a pharmaceutically acceptable salt thereof), optionally wherein in the presence of COF3, the expression level of the fusion polypeptide is substantially decreased, e.g., by at least about 1, 2, 3, 4, 5, 6, 7, 8, 9, 10, 20, 30, 40, 50, 60, 70, 80, 90, or 100 percent, relative to the expression level of the fusion polypeptide after step i) and before step ii), e.g., as measured by an assay described herein, e.g., a Western blot analysis or a flow cytometry analysis.

[0495] In some embodiments, the fusion polypeptide or the cell is contacted with COF3 ex vivo. In some embodiments, the fusion polypeptide or the cell is contacted with COF3 in vivo. In some embodiments, the stabilization compound is bazedoxifene, or a pharmaceutically acceptable salt thereof. In some embodiments, the degradation domain comprises the amino acid sequence of SEQ ID NO: 46.

[0496] In one aspect, disclosed herein is a method of making a cell, comprising:
[0497] i) providing a cell comprising a nucleic acid molecule encoding a fusion polypeptide comprising a COF3/CRBN-binding polypeptide and a chimeric antigen receptor (CAR), optionally wherein the CAR comprises, in a N-terminal to C-terminal direction, an antigen binding domain, a transmembrane domain, and one or more intracellular signaling domains; and
[0498] ii) contacting the cell ex vivo with COF3, optionally wherein:
[0499] in the presence of COF3, the expression level of the fusion polypeptide is substantially decreased, e.g., by at least about 1, 2, 3, 4, 5, 6, 7, 8, 9, 10, 20, 30, 40, 50, 60, 70, 80, 90, or 100 percent, relative to the expression level of the fusion polypeptide in the absence of COF3, e.g., as measured by an assay described herein, e.g., a Western blot analysis or a flow cytometry analysis.

[0500] In one aspect, provided herein is a method of treating a subject having a disease associated with expression of a tumor antigen, comprising:
[0501] i) contacting a cell disclosed herein (e.g., a cell comprising a fusion polypeptide comprising a COF3/CRBN-binding polypeptide and a heterologous polypeptide (e.g., a CAR polypeptide)) with COF3 ex vivo, optionally wherein:
[0502] in the presence of COF3, the expression level of the fusion polypeptide is decreased, e.g., by at least about 1, 2, 3, 4, 5, 6, 7, 8, 9, 10, 20, 30, 40, 50, 60, 70, 80, 90, or 100 percent, relative to the expression level of the fusion polypeptide before the cell is contacted with COF3 ex vivo, and
[0503] ii) administering to the subject an effective amount of the cell, optionally wherein the method further comprises after step i) and prior to step ii):
[0504] reducing the amount of COF3 contacting the cell, e.g., inside and/or surrounding the cell, thereby treating the disease.

[0505] In some embodiments, the method further comprises after step ii):
[0506] iii) administering to the subject an effective amount of COF3, optionally wherein the administration of COF3 decreases, e.g., by at least about 1, 2, 3, 4, 5, 6, 7, 8, 9, 10, 20, 30, 40, 50, 60, 70, 80, 90, or 100 percent, the expression level of the fusion polypeptide relative to the expression level of the fusion polypeptide after step ii) and prior to step iii), optionally wherein:
[0507] a) the subject has developed, is developing, or is anticipated to develop an adverse reaction,
[0508] b) the administration of COF3 is in response to an occurrence of an adverse reaction in the subject, or in response to an anticipation of an occurrence of an adverse reaction in the subject, and/or
[0509] c) the administration of COF3 reduces or prevents an adverse effect.

[0510] In some embodiments, the method further comprises after step iii):
[0511] iv) discontinuing the administration of COF3, optionally wherein discontinuing the administration of COF3 increases, e.g., by at least about 1.5-, 2-, 3-, 4-, 5-, 10-, 20-, 30-, 40-, or 50-fold, the expression level of the fusion polypeptide relative to the expression level of the fusion polypeptide after step iii) and prior to step iv) (e.g., wherein discontinuing the administration of COF3 restores the expression level of the fusion polypeptide to the expression level after step ii) and prior to step iii)), optionally wherein:
[0512] a) the subject has relapsed, is relapsing, or is anticipated to relapse,
[0513] b) the discontinuation of the administration of COF3 is in response to a tumor relapse in the subject, or in response to an anticipation of a relapse in the subject, and/or
[0514] c) the discontinuation of the administration of COF3 treats or prevents a tumor relapse.

[0515] In some embodiments, the method further comprises after step iv):
[0516] v) repeating step iii) and/or iv),
[0517] thereby treating the disease.

[0518] In some embodiments, COF3 is a compound disclosed in Table 29, or a pharmaceutically acceptable salt thereof. In some embodiments, the COF3/CRBN-binding polypeptide comprises or consists of the amino acid sequence of SEQ ID NO: 109, or an amino acid sequence with at least 80, 85, 90, or 95% identity thereto.

[0519] In one aspect, provided herein is a method of treating a subject having a disease associated with expression of a tumor antigen, comprising:
[0520] i) administering to the subject an effective amount of a cell disclosed herein (e.g., a cell comprising a fusion polypeptide comprising a COF3/CRBN-binding polypeptide and a heterologous polypeptide (e.g., a CAR polypeptide)), optionally wherein the cell is contacted with COF3 ex vivo before administration, optionally wherein:
[0521] in the presence of COF3, the expression level of the fusion polypeptide is decreased, e.g., by at least about 1, 2, 3, 4, 5, 6, 7, 8, 9, 10, 20, 30, 40, 50, 60, 70, 80, 90, or 100 percent, relative to the expression level of the fusion polypeptide before the cell is contacted with COF3 ex vivo, optionally wherein after the cell is contacted with COF3 ex vivo and before the cell is administered to the subject, the amount of COF3 contacting the cell, e.g., inside and/or surrounding the cell, is reduced, thereby treating the disease.

[0522] In some embodiments, the cell is not contacted with COF3 ex vivo before administration.

[0523] In some embodiments, the method further comprises after step i):
[0524] ii) administering to the subject an effective amount of COF3, optionally wherein the administration of COF3 decreases, e.g., by at least about 1, 2, 3, 4, 5, 6, 7, 8, 9, 10, 20, 30, 40, 50, 60, 70, 80, 90, or 100 percent, the expression level of the fusion polypeptide relative to the expression level of the fusion polypeptide after step i) and prior to step ii), optionally wherein:
[0525] a) the subject has developed, is developing, or is anticipated to develop an adverse reaction,
[0526] b) the administration of COF3 is in response to an occurrence of an adverse reaction in the subject, or in response to an anticipation of an occurrence of an adverse reaction in the subject, and/or
[0527] c) the administration of COF3 reduces or prevents an adverse effect.

[0528] In some embodiments, the method further comprises after step ii):
[0529] iii) discontinuing the administration of COF3, optionally wherein discontinuing the administration of COF3 increases, e.g., by at least about 1.5-, 2-, 3-, 4-, 5-, 10-, 20-, 30-, 40-, or 50-fold, the expression level of the fusion polypeptide relative to the expression level of the fusion polypeptide after step ii) and prior to step iii) (e.g., wherein discontinuing the administration of COF3 restores the expression level of the fusion polypeptide to the expression level after step i) and prior to step ii)), optionally wherein:
[0530] a) the subject has relapsed, is relapsing, or is anticipated to relapse,
[0531] b) the discontinuation of the administration of COF3 is in response to a tumor relapse in the subject, or in response to an anticipation of a relapse in the subject, and/or
[0532] c) the discontinuation of the administration of COF3 treats or prevents a tumor relapse.

[0533] In some embodiments, the method further comprises after step iii):
[0534] iv) repeating step ii) and/or iii),
[0535] thereby treating the disease.

[0536] In some embodiments, COF3 is a compound disclosed in Table 29, or a pharmaceutically acceptable salt thereof. In some embodiments, the COF3/CRBN-binding polypeptide comprises or consists of the amino acid sequence of SEQ ID NO: 109, or an amino acid sequence with at least 80, 85, 90, or 95% identity thereto.

[0537] In one aspect, provided herein is a method of treating a subject having a disease associated with expression of a tumor antigen, comprising:
[0538] i) administering an effective amount of COF3 to the subject, wherein the subject comprises a cell disclosed herein (e.g., a cell comprising a fusion polypeptide comprising a COF3/CRBN-binding polypeptide and a heterologous polypeptide (e.g., a CAR polypeptide)), optionally wherein the administration of COF3 decreases, e.g., by at least about 1, 2, 3, 4, 5, 6, 7, 8, 9, 10, 20, 30, 40, 50, 60, 70, 80, 90, or 100 percent, the expression level of the fusion polypeptide relative to the expression level of the fusion polypeptide before the administration of COF3, optionally wherein:
[0539] a) the subject has developed, is developing, or is anticipated to develop an adverse reaction,
[0540] b) the administration of COF3 is in response to an occurrence of an adverse reaction in the subject, or in response to an anticipation of an occurrence of an adverse reaction in the subject, and/or
[0541] c) the administration of COF3 reduces or prevents an adverse effect.

[0542] In some embodiments, the method further comprises after step i):
[0543] ii) discontinuing the administration of COF3, optionally wherein discontinuing the administration of COF3 increases, e.g., by at least about 1.5-, 2-, 3-, 4-, 5-, 10-, 20-, 30-, 40-, or 50-fold, the expression level of the fusion polypeptide relative to the expression level of the fusion polypeptide after step i) and prior to step ii) (e.g., wherein discontinuing the administration of COF3 restores the expression level of the fusion polypeptide to the expression level before the administration of COF3), optionally wherein:
[0544] a) the subject has relapsed, is relapsing, or is anticipated to relapse,
[0545] b) the discontinuation of the administration of COF3 is in response to a tumor relapse in the subject, or in response to an anticipation of a relapse in the subject, and/or
[0546] c) the discontinuation of the administration of COF3 treats or prevents a tumor relapse.

[0547] In some embodiments, the method further comprises after step ii):
[0548] iii) repeating step i) and/or ii),
[0549] thereby treating the disease.

[0550] In some embodiments, COF3 is a compound disclosed in Table 29, or a pharmaceutically acceptable salt thereof. In some embodiments, the COF3/CRBN-binding polypeptide comprises or consists of the amino acid sequence of SEQ ID NO: 109, or an amino acid sequence with at least 80, 85, 90, or 95% identity thereto.

[0551] In one aspect, provided herein is a method of treating a subject having a disease associated with expression of a tumor antigen, comprising:
[0552] i) administering to the subject:
[0553] (1) a stabilization compound, and
[0554] (2) an effective amount of a cell disclosed herein (e.g., a cell comprising a fusion polypeptide comprising a COF3/CRBN-binding polypeptide, a heterologous polypeptide (e.g., a CAR polypeptide), and a degradation domain), optionally wherein:
[0555] the expression level of the fusion polypeptide in the presence of the stabilization compound is e.g., at least about 1.5-, 2-, 3-, 4-, 5-, 10-, 20-, 30-, 40-, or 50-fold, higher than the expression level of the fusion polypeptide in the absence of the stabilization compound, thereby treating the disease.

[0556] In some embodiments, the method further comprises after step i):
[0557] ii) discontinuing the administration of the stabilization compound, optionally wherein discontinuing the administration of the stabilization compound reduces, e.g., at least about 1.5-, 2-, 3-, 4-, 5-, 10-, 20-, 30-, 40-, or 50-fold, the expression level of the fusion polypeptide relative to the expression of the fusion polypeptide after step i) and prior to step ii), optionally wherein:
[0558] a) the subject responded to the treatment of step i) (e.g., the subject has a complete response to the treatment of step i), the subject shows a shrinkage in tumor mass, the subject shows a decrease in tumor cells, or the treatment of step i) is effective in the subject), and/or
[0559] b) the discontinuation of the administration of the stabilization compound is in response to a response of the subject to the treatment of step i) (e.g., the subject has a complete response to the treatment of step i), the subject shows a shrinkage in tumor mass, the subject shows a decrease in tumor cells, or the treatment of step i) is effective in the subject).

[0560] In some embodiments, the method further comprises after step i):
[0561] iii) discontinuing the administration of the stabilization compound, optionally wherein discontinuing the administration of the stabilization compound reduces, e.g., at least about 1.5-, 2-, 3-, 4-, 5-, 10-, 20-, 30-, 40-, or 50-fold, the expression level of the fusion polypeptide relative to the expression of the fusion polypeptide after step i) and prior to step ii), optionally wherein:
[0562] a) the subject has developed, is developing, or is anticipated to develop an adverse reaction,
[0563] b) the discontinuation of the administration of the stabilization compound is in response to an occurrence of an adverse reaction in the subject, or in response to an anticipation of an occurrence of an adverse reaction in the subject, and/or
[0564] c) the discontinuation of the administration of the stabilization compound reduces or prevents an adverse effect.

[0565] In some embodiments, the method further comprises after step i):
[0566] iv) discontinuing the administration of the stabilization compound and administering to the subject an effective amount of COF3, optionally wherein step iv) reduces, e.g., at least about 1.5-, 2-, 3-, 4-, 5-, 10-, 20-, 30-, 40-, or 50-fold, the expression level of the fusion polypeptide relative to the expression of the fusion polypeptide after step i) and prior to step iv), optionally wherein:
[0567] a) the subject has developed, is developing, or is anticipated to develop an adverse reaction,
[0568] b) step iv) is in response to an occurrence of an adverse reaction in the subject, or in response to an anticipation of an occurrence of an adverse reaction in the subject, and/or
[0569] c) step iv) reduces or prevents an adverse effect. In some embodiments, the adverse effect is an acute toxicity.

[0570] In some embodiments, the method further comprises after step iv):
[0571] v) discontinuing the administration of COF3, e.g., after the amount of cells expressing the fusion polypeptide on the surface is smaller than a pre-defined value, for, e.g., 1 day, 5 days, 10 days, or 15 days.

[0572] In some embodiments, the method further comprises after step ii), iii), iv), or v):
[0573] vi) administering an effective amount of a stabilization compound, optionally wherein the administration of the stabilization compound increases, e.g., by at least about 1.5-, 2-, 3-, 4-, 5-, 10-, 20-, 30-, 40-, or 50-fold, the expression level of the fusion polypeptide relative to the expression level of the fusion polypeptide after step ii), iii), iv), or v) and prior to step vi), optionally wherein:
[0574] a) the subject has relapsed, is relapsing, or is anticipated to relapse,
[0575] b) the administration of the stabilization compound is in response to a tumor relapse in the subject, or in response to an anticipation of a relapse in the subject, and/or
[0576] c) the administration of the stabilization compound treats or prevents a tumor relapse.

[0577] In some embodiments, the method further comprises after step vi):
[0578] vii) repeating step iii), iv), v), or vi),
[0579] thereby treating the disease.

[0580] In some embodiments, the method further comprises prior to step i):
[0581] viii) contacting the cell with a stabilization compound ex vivo, optionally wherein the expression level of the fusion polypeptide in the presence of the stabilization compound is e.g., at least about 1.5-, 2-, 3-, 4-, 5-, 10-, 20-, 30-, 40-, or 50-fold, higher than the expression level of the fusion polypeptide in the absence of the stabilization compound.

[0582] In some embodiments, the cell is not contacted with the stabilization compound ex vivo before administration.

[0583] In some embodiments, the stabilization compound is bazedoxifene, or a pharmaceutically acceptable salt thereof, and optionally wherein the degradation domain comprises the amino acid sequence of SEQ ID NO: 46.

[0584] In some embodiments, COF3 is a compound disclosed in Table 29, or a pharmaceutically acceptable salt thereof. In some embodiments, the COF3/CRBN-binding polypeptide comprises or consists of the amino acid sequence of SEQ ID NO: 109, or an amino acid sequence with at least 80, 85, 90, or 95% identity thereto.

[0585] In some embodiments, the heterologous polypeptide of the fusion polypeptide is a chimeric antigen receptor (CAR), optionally wherein the CAR comprises, in a N-terminal to C-terminal direction, an antigen binding domain, a transmembrane domain, and one or more intracellular signaling domains.

[0586] In one aspect, this invention also provides a fusion polypeptide, nucleic acid molecule, vector, viral particle, cell, or pharmaceutical composition disclosed herein for use as a medicament. In one aspect, this invention also provides a fusion polypeptide, nucleic acid molecule, vector, viral particle, cell, or pharmaceutical composition disclosed herein for use in the treatment of a subject having a disease associated with expression of a tumor antigen.

[0587] In certain embodiments of the foregoing methods, the disease associated with expression of a tumor antigen is a cancer.

[0588] In some embodiments, the cancer is mesothelioma (e.g., malignant pleural mesothelioma), e.g., in a subject who has progressed on at least one prior standard therapy; lung cancer (e.g., non-small cell lung cancer, small cell lung cancer, squamous cell lung cancer, or large cell lung cancer); pancreatic cancer (e.g., pancreatic ductal adenocarcinoma, or metastatic pancreatic ductal adenocarcinoma (PDA), e.g., in a subject who has progressed on at least one prior standard therapy); esophageal adenocarcinoma, ovarian cancer (e.g., serous epithelial ovarian cancer, e.g., in a subject who has progressed after at least one prior regimen of standard therapy), breast cancer, colorectal cancer, bladder cancer or any combination thereof.

[0589] In some embodiments, the disease associated with expression of a tumor antigen is a hematological cancer, e.g., a hematological cancer chosen from a leukemia or lymphoma. In some embodiments, the cancer is chosen from: chronic lymphocytic leukemia (CLL), mantle cell lymphoma (MCL), multiple myeloma, acute lymphoid leukemia (ALL), Hodgkin lymphoma, B-cell acute lymphoid leukemia (BALL), T-cell acute lymphoid leukemia (TALL), small lymphocytic leukemia (SLL), B cell prolymphocytic leukemia, blastic plasmacytoid dendritic cell neoplasm, Burkitt's lymphoma, diffuse large B cell lymphoma (DLBCL), DLBCL associated with chronic inflammation, chronic myeloid leukemia, myeloproliferative neoplasms, follicular lymphoma, pediatric follicular lymphoma, hairy cell leukemia, small cell- or a large cell-follicular lymphoma, malignant lymphoproliferative conditions, MALT lymphoma (extranodal marginal zone lymphoma of mucosa-associated lymphoid tissue), Marginal zone lymphoma, myelodysplasia, myelodysplastic syndrome, non-Hodgkin lymphoma, plasmablastic lymphoma, plasmacytoid dendritic cell neoplasm, Waldenstrom macroglobulinemia, splenic marginal zone lymphoma, splenic lymphoma/leukemia, splenic diffuse red pulp small B-cell lymphoma, hairy cell leukemia-variant, lymphoplasmacytic lymphoma, a heavy chain disease, plasma cell myeloma, solitary plasmocytoma of bone, extraosseous plasmocytoma, nodal marginal zone lymphoma, pediatric nodal marginal zone lymphoma, primary cutaneous follicle center lymphoma, lymphomatoid granulomatosis, primary mediastinal (thymic) large B-cell lymphoma, intravascular large B-cell lymphoma, ALK+ large B-cell lymphoma, large B-cell lymphoma arising in HHV8-associated multicentric Castleman disease, primary effusion lymphoma, B-cell lymphoma, acute myeloid leukemia (AML), or unclassifiable lymphoma.

[0590] In some embodiments, the cancer is chosen from MCL, CLL, ALL, Hodgkin lymphoma, AML, or multiple myeloma.

[0591] In certain embodiments of the foregoing methods, the cell is autologous to said subject. In certain embodiments of the foregoing methods, the cell is allogenic to said subject. In some embodiments, the cell is a CAR-expressing cell, e.g., a CART cell.

[0592] In some embodiments, the subject was administered a cell expressing at least one fusion polypeptide disclosed herein, prior to administration of COF1, COF2, or COF3.

[0593] In one aspect, disclosed herein is a method of identifying a genetic element associated with a specific biological phenotype, e.g., a genetic element associated with the development and/or progression of a cancer, the method comprising the steps of:
[0594] i) modulating the expression of a fusion polypeptide disclosed herein (e.g., a fusion polypeptide comprising a COF1/CRBN- or COF3/CRBN-binding polypeptide and a heterologous polypeptide) in cells by exposing said cell to COF1 or COF3, e.g., lenalidomide, or a pharmaceutically acceptable salt thereof,
[0595] (ii) selecting for cells with a phenotype of interest, e.g., a phenotype associated with the development and/or progression of a cancer, and
[0596] (iii) identifying said fusion polypeptide that induces said phenotype of interest,
[0597] wherein exposure of said cell to COF1 or COF3, e.g., lenalidomide, or a pharmaceutically acceptable salt thereof, decreases, e.g., by at least about 1, 2, 3, 4, 5, 6, 7, 8, 9, 10, 20, 30, 40, 50, 60, 70, 80, 90, or 100 percent, the expression level of said fusion polypeptide relative to the expression level of said fusion polypeptide prior to exposure to COF1 or COF3, e.g., lenalidomide, or a pharmaceutically acceptable salt thereof.

[0598] In one aspect, disclosed herein is a method of identifying a genetic element associated with a specific biological phenotype, e.g., a genetic element associated with the development and/or progression of a cancer, the method comprising the steps of:
[0599] i) modulating the expression of a fusion polypeptide disclosed herein (e.g., a fusion polypeptide comprising a COF1/CRBN-, COF2/CRBN-, or COF3/CRBN-binding polypeptide, a heterologous polypeptide, and a degradation domain) in cells by exposing said cell to a stabilization compound, e.g., bazedoxifene, or a pharmaceutically acceptable salt thereof, and then to COF1, COF2, or COF3, e.g., lenalidomide, or a pharmaceutically acceptable salt thereof,
[0600] (ii) selecting for cells with a phenotype of interest, e.g., a phenotype associated with the development and/or progression of a cancer, and
[0601] (iii) identifying said fusion polypeptide that induces said phenotype of interest,
[0602] wherein exposure of said cell to the stabilization compound, e.g., bazedoxifene, or a pharmaceutically acceptable salt thereof, increases, e.g., by at least about 1.5-, 2-, 3-, 4-, 5-, 10-, 20-, 30-, 40-, or 50-fold, the expression level of the fusion polypeptide relative to the expression level of the fusion polypeptide prior to exposure to the stabilization compound, e.g., bazedoxifene, or a pharmaceutically acceptable salt thereof, and wherein exposure of said cell to COF1, COF2, or COF3, e.g., lenalidomide, or a pharmaceutically acceptable salt thereof, decreases, e.g., by at least about 1, 2, 3, 4, 5, 6, 7, 8, 9, 10, 20, 30, 40, 50, 60, 70, 80, 90, or 100 percent, the expression level of said fusion polypeptide relative to the expression level of said fusion polypeptide after exposure to the stabilization compound and prior to exposure to COF1 or COF2 (such as thalidomide and derivatives thereof (e.g., lenalidomide, pomalidomide, and thalidomide)), or COF3 (e.g., a compound disclosed in Table 29).

[0603] In certain embodiments of the foregoing aspects, the heterologous polypeptide is a chimeric antigen receptor (CAR) polypeptide. In some embodiments, the CAR polypeptide comprises an amino acid sequence disclosed herein, e.g., an amino acid sequence disclosed in Table 3. In some embodiments, the CAR polypeptide is an anti-CD19 CAR polypeptide and comprises an amino acid sequence disclosed herein, e.g., an amino acid sequence disclosed in any of: Table 5, Table 6, Table 7, and Table 30. In some embodiments, the CAR polypeptide is an anti-CD123 CAR polypeptide and comprises an amino acid sequence disclosed herein, e.g., an amino acid sequence disclosed in any of: Table 8, Table 9, Table 10, Table 11, Table 12, Table 13, and Table 14. In some embodiments, the CAR polypeptide is an anti-BCMA CAR polypeptide and comprises an amino acid sequence disclosed herein, e.g., an amino acid sequence disclosed in any of: Table 15, Table 16, Table 17, Table 18, and Table 31. In some embodiments, the CAR polypeptide is an anti-CD22 CAR polypeptide and comprises an amino acid sequence disclosed herein, e.g., an amino acid sequence disclosed in any of: Table 19 and Table 20. In some embodiments, the CAR polypeptide is an anti-CD20 CAR polypeptide and comprises an amino acid sequence disclosed herein, e.g., an amino acid sequence disclosed in Table 32. In some embodiments, the CAR polypeptide is an anti-EGFRvIII CAR polypeptide and comprises an amino acid sequence disclosed herein, e.g., an amino acid sequence disclosed in Table 33. In some embodiments, the CAR polypeptide is an anti-mesothelin CAR polypeptide and comprises an amino acid sequence disclosed herein, e.g., an amino acid sequence disclosed in Table 34.

[0604] In certain embodiments of the foregoing aspects, the fusion polypeptide comprises an amino acid sequence disclosed herein, e.g., an amino acid sequence disclosed in Table 4 or Table 28.

[0605] In certain embodiments of the foregoing aspects, the COF1/CRBN-, COF2/CRBN-, or COF3/CRBN-binding polypeptide comprises an amino acid sequence disclosed herein, e.g., an amino acid sequence disclosed in Table 1.

[0606] In certain embodiments of the foregoing aspects, the degradation domain comprises an amino acid sequence disclosed herein, e.g., an amino acid sequence disclosed in Table 22.

[0607] In certain embodiments of the foregoing aspects, the heterologous protease cleavage site comprises an amino acid sequence disclosed herein, e.g., an amino acid sequence disclosed in Table 23.

### BRIEF DESCRIPTION OF THE DRAWINGS

[0608] FIG. 1A is a schematic of the HilD-tag IKZF3 136-180 and 236-249 degron fused to Nanoluciferase via a 16 glycine-serine linker. FIG. 1B is a graph showing the level of luminescence measured from HEK293T cells reverse transfected with 50 ng of pNL1.1CMV construct encoding NanoLuciferase linked to IKZF3 136-180 and 236-249. IKZF3 136-180 and 236-249 facilitated a reduction in luminescence in cells treated with 1 μM, 10 μM, or 100 μM lenalidomide for 6 hours as compared to cells treated with DMSO only. MG132 treatment blocked lenalidomide-dependent degradation of NanoLuciferase.

[0609] FIG. 2 is a Western blot showing that IKZF3 136-180 and 236-249 facilitated lenalidomide-dependent degradation of NanoLuciferase (IC50=10 nM) in HEK293GT cells transfected with a pNL1.1CMV construct encoding IKZF3 136-180 and 236-249-tagged NanoLuciferase. Lenalidomide-dependent degradation was not observed in HEK293GT Cereblon (CRBN) KO cells that were similarly transfected. Treatment with a proteasome inhibitor, MG132, blocked the ability of IKZF3 136-180 and 236-249 to facilitate lenalidomide-dependent degradation.

[0610] FIG. 3A is a schematic depicting IKZF3 136-180 which contains two beta-sheets flanking a hairpin and an alpha-helix as well as IKZF3 236-249, which is predicted as an additional alpha-helix. Below the schematic is a diagram of the shortened versions of the IKZF3 136-180 degron, eliminating amino acids on the N and C-terminus (SEQ ID NOs: 3, 5, and 7-10, respectively, in order of appearance). FIG. 3B is a Western blot showing results from studies testing lenalidomide-dependent degradation of NanoLuciferase fused to various IKZF3-based degradation tags. The IKZF3-based degradation tags were fused to the N-terminus of NanoLuciferase, cloned into pNL1.1CMV vectors, and transfected into HEK293T cells. The transfected cells were treated with either DMSO or 10 μM lenalidomide for 4 hours before analyzed by Western blot. Two exposures (a long and a short exposure) were shown for NanoLuciferase (“Nanoluc”). IKZF3 136-180 and 236-249, IKZF3 136-180 and 236-249 K245R, IKZF3 136-180 and 236-249 K245S, IKZF3 136-180 MALEK, and IKZF3 136-170 MALEK all facilitated lenalidomide-induced degradation, whereas IKZF3 140-170 MALEK, IKZF3 141-163 MALEK, and IKZF3 145-155 MALEK did not mediate lenalidomide induced degradation.

[0611] FIGS. 4A and 4B are Western blot graphs showing lenalidomide-dependent degradation of IKZF3 136-180-tagged NanoLuciferase (FIG. 4A) or IKZF3 136-170 MALEK-tagged NanoLuciferase (FIG. 4B) in HEK293T cells, with an IC50 of approximately 100 nM with a 2-hour lenalidomide treatment in both cases. The tagged NanoLuciferase fusions were expressed using pNL1.1CMV constructs. FIG. 4C is a Western blot showing a time-course of lenalidomide-dependent degradation of IKZF3 136-180-tagged NanoLuciferase in HEK293T cells showing degradation as soon as 1 hour and near complete degradation by 4 hours. The tagged NanoLuciferase fusion was expressed using a pNL1.1CMV construct.

[0612] FIG. 5A is a Western blot showing lenalidomide-dependent degradation of IKZF3 136-180 and 236-249-tagged melanogenesis associated transcription factor (MITF) (left panel) as well as IKZF3 136-180-tagged MITF (right panel). The tagged MITF fusions were transfected into HEK293T using pNL1.1CMV constructs. The degradation of IKZF3 136-180 and 236-249-tagged MITF shows an IC50 of ˜100 nM. This degradation depended on the activity of proteasome as the degradation was blocked by MG132 treatment. IKZF3 136-180 also mediated lenalidomide-dependent degradation, although to a lesser degree than IKZF3 136-180 and 236-249. FIG. 5B is a Western blot showing lenalidomide-dependent degradation of IKZF3 136-180 and 236-249-tagged MITF (left panel) as well as IKZF3 136-180-tagged MITF (right panel) after cells expressing these fusion proteins were treated with 10 μM of lenalidomide for various amounts of time. Among the time points tested, the 4-hour treatment shows maximal amount of degradation.

[0613] FIGS. 6A and 6B are Western blot graphs showing lenalidomide-dependent degradation of MITF tagged with IKZF3 136-180 and 236-249 (FIG. 6A) or IKZF3 136-180 and 236-249 in which every lysine residue in the tag was mutated to arginine (“lysine free IKZF3 136-180 and 236-249”) (FIG. 6B). HEK293T cells expressing the tagged MITF fusions using pNL1.1CMV constructs were treated with various concentrations of lenalidomide for 24 hours. The IC50 is approximately 10 nM for IKZF3 136-180 and 236-249-tagged MITF (FIG. 6A) and is below 100 nM for lysine free IKZF3 136-180 and 236-249-tagged MITF (FIG. 6B). In both cases, lenalidomide-dependent degradation was dependent on proteasome as the degradation could be blocked by the proteasome inhibitor, MG132. This data suggests that MITF, rather than the IKZF3 degron tag, was being ubiquitinated. FIG. 6C is a Western blot showing lenalidomide-dependent degradation of lysine free IKZF3 136-180 and 236-249-tagged MITF. HEK293T cells expressing the tagged MITF fusion using a pNL1.1CMV construct was treated with 10 μM lenalidomide for 2 hours, 4 hours, 8 hours, or 24 hours. FIG. 6D is a Western blot of IKZF3 136-180 and 236-249-tagged MITF (left panel) as well as lysine free IKZF3 136-180 and 236-249-tagged MITF (right panel). HEK293T cells expressing the tagged MITF fusions using the pNL1.1CMV constructs were treated with 10 μM of either lenalidomide, pomalidomide, thalidomide, a negative control IMiD that can bind to CRBN, but not IKZF1 or IKZF3, or DMSO for 24 hours before the cells were subjected to Western blot analysis. Pomalidomide mediated the degradation of the tagged MITF to a slightly greater extent than lenalidomide, whereas thalidomide was much less effective in mediating such degradation.

[0614] FIG. 7 is a Western blot showing lenalidomide-dependent degradation of IKZF3 136-180 Q147H-tagged MITF. HEK293T cells transfected with pNL1.1CMV constructs encoding the tagged MITF fusions were treated with various lenalidomide doses for 24 hours. IKZF3 136-180 Q147H-tagged MITF did not show degradation in the presence of lenalidomide.

[0615] FIG. 8 is a Western blot showing lenalidomide-dependent degradation of IKZF3 136-180 and 236-249-tagged avian myelocytomatosis viral oncogene (MYC) homolog with an IC50 of approximately 10 nM. HEK293T cells expressing tagged MYC fusions using pNL1.1CMV constructs were treated with various lenalidomide doses for 4 hours.

[0616] FIG. 9A is a Western blot showing 4-hour lenalidomide-dependent degradation of C-terminally degron-tagged single-pass membrane proteins, CD3zeta, CD8/CD3zeta chimera, CD8, CD19, and CD22. Jurkat cells were infected with pNGX_LV_V002-CDx-IKZF3 136-180 and 236-249 construct virus, selected with G418, and treated with 10 μM lenalidomide or DMSO. Shown in FIG. 9A is staining using an anti-V5 antibody (both a long 1 min exposure and a short 1 second exposure are shown) and an anti-beta-actin antibody. All of the constructs were expressed and degraded with 10 μM lenalinomide treatment. The table in FIG. 9A shows the protein molecular weight (MW), number of cytosolic amino acid residues (“cytosolic AA”), and number of cytosolic lysines for each protein. Interestingly, degradation correlates better with the total number of cytoplasmic amino acids (“AA”) than with the number of cytosolic lysine residues. FIGS. 9B, 9C, and 9D are Western blot graphs showing lenalidomide-dependent degradation of the C-terminally tagged CD19 (FIG. 9B), C-terminally tagged CD3zeta (FIG. 9C), and C-terminally tagged CD8/CD3zeta (FIG. 9D). Cells expressing IKZF3 136-180 and 236-249-tagged CD19, CD3zeta, or CD8/CD3zeta were treated with 10 μM of lenalidomide for 6 hours or various lenalidomide doses for 24 hours. In FIG. 9B, degradation of IKZF3 136-180 and 236-249-tagged CD19 shows an IC50 of approximate 100 nM and strong degradation was detected at 6 hours. The degradation of IKZF3 136-180 and 236-249-tagged CD3zeta shown in FIG. 9C is weaker than that of IKZF3 136-180 and 236-249-tagged CD19. The degradation of tagged CD3zeta was evident after cells were treated with 10 μM of lenalidomide for 24 hours. The degradation of IKZF3 136-180 and 236-249-tagged CD8/CD3zeta shown in FIG. 9D is stronger than that of IKZF3 136-180 and 236-249-tagged CD3zeta.

[0617] FIGS. 10A, 10B, 10C, and 10D are a series of flow cytometry histograms comparing IKZF3 136-180 and 236-249-tagged CD19 cell surface expression on Jurkat cells that were treated with 1 μM or 10 μM lenalidomide for 1 hour (FIG. 10A), 6 hours (FIG. 10B), 16 hours (FIG. 10C), or 24 hours (FIG. 10D). Some cells were pre-treated with 10 μM MG132 prior to treatment with 10 μM lenalidomide. DMSO served as vehicle control. IKZF3 136-180 and 236-249 was fused to the C-terminus of CD19. FIGS. 10E and 10F are bar graphs showing the % CD19 positive cells (FIG. 10E) or mean fluorescence intensity (MFI) of CD19 positive cells (FIG. 10F) across all lenalidomide doses and time points tested. There was minimal degradation at 1 hour and minor degradation at 6 hours. The degradation was much more evident at 16 and 24 hours in both the 1 μM and 10 μM treatment groups and this degradation could be partially blocked by the proteasome inhibitor MG132. There was approximately 50% reduction of CD19 positive cells at 16 hours in both the 1 μM and 10 μM treatment groups (FIG. 10E), and this reduction corresponded with a reduction in MFI (FIG. 10F).

[0618] FIG. 11 is a schematic showing an exemplary fusion protein comprising a degradation domain (degron), protease cleavage site, and a second protein domain (a CAR), and the change in degradation of the fusion protein in the presence of a drug, e.g., stabilization compound.

[0619] FIGS. 12A, 12B, and 12C are schematics showing regulation of CAR molecules fused to FurON (FIG. 12A), HilD (FIG. 12B), or both FurON and HilD (FIG. 12C). As shown in FIG. 12A, a CAR fused to FurON can be turned on by administering a stabilization compound (e.g., a small molecule ligand that binds to and stabilizes the degradation domain, e.g., bazedoxifene (BZA)) or turned off by withdrawing the stabilization compound. As shown in FIG. 12B, a CAR fused to the HilD tag can be turned off by administering an IMiD compound (e.g., lenalidomide or pomalidomide) and turned on again by stopping the administration of the IMiD compound. As shown in FIG. 12C, a CAR fused to both FurON and the HilD tag can be turned on by administering the stabilization compound, turned off by discontinuing the stabilization compound and administering an IMiD compound, and turned on again by discontinuing the IMiD compound and administering the stabilization compound. Combining the FurON switch and the HilD switch adds additional layers of regulation to the expression and activity of a CAR molecule.

[0620] FIGS. 13A, 13B, and 13C are Western blot graphs showing lenalidomide-dependent degradation of CAR molecules. JNL cells expressing construct 765 (FurON_CAR19) (FIG. 13A), construct 766 (FurON_CAR19_16GS_HilD tag_V5) (FIG. 13B), or construct 767 (FurON_CAR19_16GS_HilD tag) (FIG. 13C) were incubated in the presence 10 μM of lenalidomide (“+”) or DMSO (“−”) for 24 hours before Western blot analysis. All the samples received 1p M Bazedoxifene. “A” represents cells transduced with 275 μL of viral supernatant. “B” represents cells transduced with 700 μL of viral supernatant.

[0621] FIGS. 14A, 14B, 14C, and 14D are Western blot graphs showing lenalidomide-dependent degradation of CAR molecules. JNL cells expressing construct 771 (CAR19_HilD tag_V5) (FIG. 14A), construct 769 (CAR19_16GS_HilD tag) (FIG. 14B), construct 768 (CAR19_16GS_HilD tag_V5) (FIG. 14C), or construct 770 (CAR19_16GS_HilD tag_NoK) were incubated in the presence 10 μM of lenalidomide (“+”) or DMSO (“−”) for 24 hours before Western blot analysis. “A” represents cells transduced with 275 μL of viral supernatant. “B” represents cells transduced with 700 μL of viral supernatant.

[0622] FIGS. 15A and 15B are Western blot graphs showing lenalidomide-dependent degradation of CAR molecules. JNL cells expressing construct 769 (CAR19_16GS_HilD tag) were incubated with 10 μM of lenalidomide or DMSO for 2, 4, 8, 16 or 24 hours (FIG. 15A) or incubated with various doses of lenalidomide or DMSO for 24 hours (FIG. 15B) before Western blot analysis. FIG. 15A shows time-course of 10 μM lenalidomide treatment. FIG. 15B shows a dose-response of lenalidomide at 24 hours.

[0623] FIGS. 16A, 16B, 16C, 16D, 16E, 16F, and 16G are a set of flow cytometry histograms showing surface CAR expression in the presence or absence of lenalidomide. Constructs tested include: construct 769 (CAR19_16GS_HilD tag) (FIG. 16A), construct 771 (CAR19_HilD tag_V5) (FIG. 16B), construct 6761 (CAR19_16KGS_HilD tag_V5) (FIG. 16C), construct 768 (CAR19_16GS_HilD tag_V5) (FIG. 16D), construct 770 (CAR19_16GS_HilD tag_NoK) (FIG. 16E), construct 773 (HilD tag_CAR19_modSigPep) (FIG. 16F), and construct 774 (HilD tag_CAR19) (FIG. 16G). JNL cells expressing the indicated constructs were incubated with or without 10 μM lenalidomide for 24 hours and then subjected to flow cytometry analysis.

[0624] FIGS. 17A, 17B, and 17C are a set of flow cytometry histograms showing surface CAR expression regulated by lenalidomide and/or bazedoxifene (BZA). Constructs tested include: construct 765 (FurON_CAR19) (FIG. 17A), construct 767 (FurON_CAR19_16GS_HilD tag) (FIG. 17B), and construct 766 (FurON_CAR19_16GS_HilD tag_V5) (FIG. 17C). JNL cells expressing the indicated constructs were incubated in the presence or absence of lenalidomide and/or bazedoxifene (BZA) for 24 hours prior to flow cytometry analysis.

[0625] FIGS. 18A, 18B, 18C, and 18D are a set of flow cytometry histograms showing surface CAR expression in the presence or absence of various concentrations of lenalidomide. Constructs tested include: construct 769 (CAR19_16GS_HilD tag) (FIGS. 18A and 18C) and construct 770 (CAR19_16GS_HilD tag_NoK) (FIGS. 18B and 18D). JNL cells expressing the indicated constructs were incubated in the presence or absence of lenalidomide for 4 hours (FIGS. 18A and 18B) or 20 hours (FIGS. 18C and 18D) prior to flow cytometry analysis. FIGS. 18E and 18F are bar graphs showing % CAR expression (FIG. 18E) or mean fluorescence intensity (FIG. 18F) for each cell line and each lenalidomide concentration tested.

[0626] FIGS. 19A and 19B are a series of bar graphs showing lenalidomide response comparisons between JNL target cell line treatment conditions, length of time of target cell line treatment, time of lenalidomide treatment, and number of cells. FIG. 19A is a set of graphs showing luminescence signals from a study where JNL cells expressing construct 769 (CAR19_16GS_HilD tag) (9000 or 12000 cells/well) were treated with 10 μM lenalidomide for 4 hours or 24 hours and then incubated with Nalm6 cells, CD19-expressing K562 cells (“K562+CD19”), K562 cells, or media (no cells) for 4 hours, 8 hours, or 20 hours. FIG. 19B is a set of graphs showing a subset of data from the study described in FIG. 19A: JNL cells expressing construct 769 (CAR19_16GS_HilD tag) (9000 cells/well) were treated with 10 μM lenalidomide for 4 hours and then incubated with Nalm6 cells, CD19-expressing K562 cells (“K562+CD19”), K562 cells, or media (no cells) for 20 hours. The y-axis in FIG. 19B shows luminescence signals after the background signals (signals from the media sample) were subtracted. In both FIGS. 19A and 19B, the two bars in each graph represent samples treated with DMSO (“DMSO”) and samples treated with lenalidomide (“Lenalidomide (10 μM)”), respectively.

[0627] FIGS. 20A and 20B are a series of bar graphs showing lenalidomide response comparisons between JNL target cell treatment conditions, length of time of target cell treatment, time of lenalidomide treatment, and number of cells. FIG. 20A is a set of graphs showing luminescence signals from a study where JNL cells expressing construct 767 (FurON_CAR19_16GS_HilD tag) (9000 or 12000 cells/well) were treated with 10 μM lenalidomide for 4 hours or 24 hours and then incubated with Nalm6 cells, CD19-expressing K562 cells (“K562+CD19”), K562 cells, or media (no cells) for 4 hours, 8 hours, or 20 hours. FIG. 20B is a set of graphs showing a subset of data from the study described in FIG. 20A: JNL cells expressing construct 767 (FurON_CAR19_16GS_HilD tag) (9000 cells/well) were treated with 10 μM lenalidomide for 4 hours and then incubated with Nalm6 cells, CD19-expressing K562 cells (“K562+CD19”), K562 cells, or media (no cells) for 20 hours. The y-axis in FIG. 20B shows luminescence signals after the background signals (signals from the media sample) were subtracted. In both FIGS. 20A and 20B, the four bars in each graph represent samples treated with neither lenalidomide nor bazedoxifene (“DMSO>>DMSO”), samples treated with bazedoxifene but not lenalidomide (“DMSO>>A (1 μM)”), samples treated with lenalidomide but not bazedoxifene (“Lenalidomide (10 μM)>>DMSO”), and samples treated with both lenalidomide and bazedoxifene (“Lenalidomide (10 μM)>>BZA (1 μM)”), respectively.

[0628] FIGS. 21A, 21B, 21C, and 21D are graphs showing a dose-response effect of lenalidomide on an NFAT luciferase reporter across three treatment time points. JNL cells expressing construct 765 (FurON_CAR19) (FIG. 21A), construct 767 (FurON_CAR19_16GS_HilD tag) (FIG. 21B), construct 769 (CAR19_16GS_HilD tag) (FIG. 21C), or construct 770 (CAR19_16GS_HilD tag_NoK) (FIG. 21D) were incubated with K562 target cells (“K562”) or K562 target cells expressing CD19 (“K562+CD19”). Lenalidomide was added 20 hours prior to adding the target cells (a 44-hour lenalidomide treatment, “20 hr pre-target cells”), 4 hours prior to adding target cells (a 28-hour lenalidomide treatment, “4 hr pre-target cells”), or 16 hours after adding target cells (an 8-hour lenalidomide treatment, “16 hr post-target cells”). JNL cells expressing construct 765 (FurON_CAR19) (FIG. 21A) or construct 767 (FurON_CAR19_16GS_HilD tag) (FIG. 21B) were also treated with bazedoxifene. In each graph, raw luminescence is plotted against the indicated lenalidomide concentration.

[0629] FIGS. 22A, 22B, 22C, and 22D are graphs showing data from the study described in FIGS. 21A, 21B, 21C, and 21D, where JNL cells were treated with MG132 5 hours prior to K562+CD19 target cell treatment, and were treated with lenalidomide 4 hours prior to K562+CD19 target cell treatment. The cells tested include: JNL cells expressing construct 765 (FurON_CAR19) (FIG. 22A), construct 767 (FurON_CAR19_16GS_HilD tag) (FIG. 22B), construct 769 (CAR19_16GS_HilD tag) (FIG. 22C), or construct 770 (CAR19_16GS_HilD tag_NoK) (FIG. 22D). The four bars in each graph represent samples treated with bazedoxifene (BZA), MG132, and lenalidomide (“BZA, MG132, Lenalidomide”), samples treated with bazedoxifene (BZA) and lenalidomide (“BZA, Lenalidomide”), samples treated with bazedoxifene (BZA) (“BZA”), and samples treated with DMSO only (“DMSO”), respectively. The y axis in each graph shows raw luminescence.

[0630] FIG. 23 is a set of schematics showing HilD-Tau fusion constructs. The 0N4R Tau isoform was used, which includes the C-terminal repeat domain exon but does not include the N-terminal exons. Lentiviral constructs were used, though all the constructs were introduced through lipofectamine transfection or nucleofection. Tau fusion products were expressed downstream of CAG or CMV promoters.

[0631] FIGS. 24A and 24B are graphs showing design and results from a study examining the recruitment of the E3 ligase CRBN to HilD-Tau fusion proteins. FIG. 24A: Diagram of experiment. Lenalidomide recruits the E3 ligase Cereblon (CRBN) to the IKZF3 beta hairpin, leading to ubiquitination and degradation of the associated protein. To test that this recruitment occurred in HilD-Tau fusions, HilD-Tau-biotin ligase fusions were generated. In the presence of biotin, biotin ligase generates a reactive biotin species which covalently binds to nearby proteins. If lenalidomide is added, CRBN should be recruited to the HilD-Tau fusion, and should be in range of biotin ligase mediated biotinylation. FIG. 24B: HEK293T cells were transfected with FLAG-tagged CRBN and HilD-Tau-biotin ligase or Tau-biotin ligase fusions. 48 hours after transfection, cells were treated for 21 hours with 50 μM biotin and either DMSO or 1 μM lenalidomide. Cells were subsequently washed in PBS, and then lysed in ice-cold M-PER buffer and protease inhibitors. Approximately 1 million cells were estimated to be lysed, in a volume of 300 μL. Western analysis of cell lysate is shown in lower blot, probed with anti-Tau (HT7) or anti-GAPDH antibodies. Biotinylated proteins were immunoprecipitated by incubating 20% of cell lysate with 50 μL of streptavidin magnetic beads (Dynabeads M-280) for 30 minutes at room temperature. Biotinylated proteins were eluted from beads by boiling, and then analyzed by Western. Probing for FLAG signal on FLAG-CRBN, strong bands were observed only in immunoprecipitated material from HEK293T cells treated with lenalidomide and containing HilD tags, but not in cells treated with DMSO, or in cells treated with lenalidomide but transfected with Tau constructs not containing the HilD tag.

[0632] FIGS. 25A, 25B and 25C are graphs showing reduction of toxic Tau protein by inducible recruitment of the E3 ligase CRBN. HEK293T cells were transfected with HilD-Tau (P301S)-YFP fusion constructs. Tau (P301S) is an aggregation-prone form of Tau, identified in patients with familial neurodegenerative diseases. Upon overnight treatment with lenalidomide, YFP fluorescence was reduced in a dose-dependent fashion by lenalidodmide, as seen in imaging of YFP fluorescence (FIG. 25A). Nine fields of view per condition are shown. FIG. 25B: YFP fluorescence intensity was quantified after lenalidomide treatment at various doses. FIG. 25C: Toxicity due to overexpression of the aggregation-prone Tau was noted, quantified by the number of cells, identified by segmentation of Hoecht dye fluorescence. Cell death was abrogated by lenalidomide treatment and reduction of Tau levels, indicating that lenalidomide inducible degradation can reveal cytoprotective action of targeted protein degradation of toxic proteins.

[0633] FIGS. 26A, 26B, 26C, and 26D are graphs showing quantification of Tau protein reduction and reduction of specific forms of Tau in HEK293T cells by inducible recruitment of CRBN. FIG. 26A: HEK293T cells were transfected with HilD-Tau (wild type) fusion constructs and treated with either lenalidomide, at varying doses, or DMSO. Top and bottom Western blots are representative of experiments repeated in triplicate. Intensity of Tau bands, from either a polyclonal anti-Tau antibody (Dako) or an antibody against phosphorylated forms of Tau (AT8) were quantified by normalization to anti-Actin band intensity. Transfection of a reduced amount of DNA in this experiment yielded a greater reduction of the phosphorylated form of Tau (1×DNA: 0.625 micrograms DNA transfected in 50 μL Optimem media with 1.5 μL lipofectamine 2000; 0.1×DNA=0.0625 micrograms; into 24-well plates of HEK cells). This suggests that this system can measure the capacity of the E3 ligase mediated degradation of Tau. In experiments shown, lenalidomide was dosed 4 hours after transfection (for the higher DNA concentration transfection) or 24 hours after transfection (for the lower DNA concentration transfection). FIG. 26B: Left panels, Tau without a HilD tag was not reduced by lenalidomide treatment. Right panels, there was no reduction of Tau levels by lenalidomide treatment in HEK293T cells knocked out for Cereblon (CRBN). FIG. 26C: Quantification of dose response of lenalidomide treatment on YFP intensity in Cereblon (CRBN) knock out (KO) cells versus wild-type (WT) cells (same data for wild-type cells as shown in FIG. 26B). FIG. 26D: Co-treatment with the Neddylation inhibitor MLN4924 (1 μM), including a 1 hour pretreatment with MLN4924, also prevented degradation of Tau. Altogether this data indicates that the E3 ligase function of CRBN is required for lenalidomide induced HilD-Tau fusion degradation.

[0634] FIG. 27 is a set of graphs showing assessment of aggregation propensity of HilD-Tau (P301S)-YFP fusion, expressed in rodent cortical neurons. Rodent cortical neurons were nucleofected with HilD-Tau (P301S)-YFP fusion, and then subsequently incubated with insoluble Tau fractions isolated from a Tau transgenic mouse, generated in-house. Live YFP fluorescence was imaged using InCell 6000 Analyzer. Middle and bottom panels show zoom-in of neurons identified in the top panel. Tau aggregates, as shown by intense, punctate YFP fluorescence, are clearly visible.

[0635] FIG. 28 is a set of graphs showing lenalidomide mediated degradation of HilD-Tau (P301S)-YFP expressed in rat neurons. Rodent cortical neurons were nucleofected with HilD-Tau (P301S)-YFP fusion, or Tau (P301S)-YFP fusion. Co-transfection with FLAG tagged CRBN was also tested (top rows). Beginning at 9 days in vitro, neurons were treated with indicated doses of lenalidomide. Neurons were imaged live for YFP fluorescence at indicated intervals. Lenalidomide treatment reduced YFP intensity over time relative to HilD-Tau (P301S)-YFP expressing neurons treated with DMSO or Tau (P301S)-YFP expressing neurons treated with lenalidomide. Degradation occurred either with or without co-transfection of human CRBN, indicating that the HilD-Tau fusion can be degraded by lenalidomide by either rodent or human CRBN.

[0636] FIG. 29 is a set of graphs showing lenalidomide mediated degradation of HilD-Tau (P301S)-YFP expressed in rat neurons. A single-cell suspension of dissociated 63 days in vitro old human neurospheres, derived from embryonic stem cells, was nucleofected with HilD-Tau (P301S)-YFP. Neurospheres contain both neurons and neuronal progenitors. After 10 days in culture, neurons were treated with lenalidomide (at a total age of 73 days in vitro). Images show YFP fluorescence after 20 hours of lenalidomide treatment, at indicated dose. Lenalidomide substantially reduced YFP fluorescence intensity in a dose dependent fashion.

[0637] FIGS. 30A and 30B are a set of graphs showing lenalidomide mediated degradation of CAR19-16GS-HilDtag. FIG. 30A is a set of Western blot graphs of CAR19-HilDtag-transduced Jurkat cells treated with a single dose of lenalidomide over time. Samples from post-compound treatment or post-washout period were tested. FIG. 30B is a set of flow cytometry histograms analyzing the same samples used in the Western blot analysis. An anti-CD3zeta antibody was used in the Western blot analysis and CD19-PE conjugate was used in the flow cytometry analysis.

[0638] FIGS. 31A, 31B, and 31C are a set of flow cytometry histograms analyzing CAR expression under different conditions. FIG. 31A is a set of flow cytometry histograms showing CAR expression in primary T cells. The effect of lenalidomide on CAR19 expression at 24 hours is shown in FIG. 31B. The effect of lenalidomide on CAR19-HilD expression at 24 or 48 hours is shown in FIG. 31C.

[0639] FIGS. 32A, 32B, and 32C are a set of graphs showing % killing mediated by CART cells. FIG. 32A is a graph showing percent killing against CD19 negative cells. FIGS. 32B and 32C are graphs showing percent killing of CAR19 T cells (FIG. 32B) or CAR19-HilD T cells (FIG. 32C) against CD19 positive cells in the presence or absence of 1p M lenalidomide.

[0640] FIGS. 33A and 33B are graphs showing the levels of secreted IFN gamma and IL2, respectively, from T cells expressing CAR19 or CAR19-HilD in the presence or absence of 1 μM lenalidomide. On the x-axis, the concentration of lenalidomide is shown in μM.

[0641] FIG. 34 is a graph showing that lenalidomide abolishes the ability of CART19.HilD to control tumor growth in vivo. Total flux of ROI is plotted against days post Nalm6 implant.

[0642] FIG. 35 is a set of flow cytometry plots showing loss of CAR19-HilD expression after lenalidomide treatment.

[0643] FIG. 36 is a graph showing levels of tumor control in different treatment groups. Total flux of ROI is plotted against days post Nalm6 implant. Early injection of lenalidomide effectively abolished CART expression in mice treated with CART-HilD, leading to absence of tumor control in this group. Later treatment of lenalidomide (day 5 post CART injection) also reduced the function of CARTs as shown by loss of tumor control in this group of mice.

[0644] FIGS. 37A, 37B, 37C, 37D, and 37E are graphs analyzing CAR expression in CD3+ cells from splenocytes. FIG. 37A is a graph showing CAR expression in CD3+ cells from splenocytes of mice treated with CART-HilD (Group 1). FIGS. 37B, 37C, and 37D are graphs showing CAR expression in CD3+ cells from splenocytes of mice treated with CART-HilD and lenalidomide (Group 2, Group 3, and Group 4, respectively). The peaks in FIGS. 37A-37D represent CD3 expression levels for individual mice. Group 1. CART19.HilD (5×106). Group 2. CART19-HilD (5×106)+Lena qd. Group 3. CART19-HilD (5×106)+Lena bid. Group 4. CART19.HilD (5×106)+Lena+5Day. FIG. 37E is a graph summarizing the data.

[0645] FIGS. 38A, 38B, and 38C are graphs showing impact of Compound I-112 on the expression and activity of CAR19-CARBtag. FIG. 38A is western blot of Jurkat NFAT luciferase (JNL) cells expressing CAR19-CARBtag treated with various doses of Compound I-112 or DMSO for 24 hours, showing a dose-responsive degradation of CAR19-CARBtag. FIG. 38B is a set of histograms showing flow cytometry analysis of CAR19 surface expression in JNL CAR19-CARBtag cells compared to untagged CAR19 cells after treatment with 10 μM Compound I-112. FIG. 38C is a graph showing JNL assay results of JNL luciferase cells expressing CAR19-CARBtag treated with a dose-response of Compound I-112 for 15 hours followed by co-treatment with either K562 (CD19−) or Nalm6 (CD19+) cells with a readout of luciferase activity.

[0646] FIG. 39 is western blot of HEK293T cells transiently transfected with CARBtag-MITF-FLAG and treated with either 10 μM, 1 μM, 0.1 μM, or 0.01 μM Compound I-112 or lenalidomide, or DMSO, showing I-112-specific degradation of the CARB-tagged MITF.

[0647] FIGS. 40A and 40B are graphs analyzing impact of lenalidomide on the expression and activity of BCMACAR-HilDtag. FIG. 40A is a set of histograms showing flow cytometry analysis results of JNL cells infected with BCMACAR HilD-tag treated with a dose-response of lenalidomide for 24 hours, showing a lenalidomide dose-dependent degradation of BCMACAR. FIG. 40B is a graph showing JNL assay results of Jurkat NFAT luciferase cells expressing BCMA-HilDtag treated with a dose-response of lenalidomide for 15 hours followed by co-treatment with KMS11 cells with a readout of luciferase activity.

### DETAILED DESCRIPTION

[0648] The present disclosure provides, at least in part, a fusion polypeptide comprising a compound of Formula (I) (COF1)/CRBN-binding polypeptide, a compound of Formula (II) (COF2)/CRBN-binding polypeptide, or a compound of Formula (III) (COF3)/CRBN-binding polypeptide for targeted protein inactivation. In some embodiments, the fusion polypeptide includes one or more COF1/CRBN-, COF2/CRBN-, or COF3/CRBN-binding polypeptides, and one or more heterologous polypeptides, e.g., heterologous mammalian, bacterial, or viral polypeptides, e.g., one or more polypeptides of interest. The COF1/CRBN-, COF2/CRBN-, or COF3/CRBN-binding polypeptide can be operably linked to the heterologous polypeptide, e.g., via a linker. In some embodiments, in the presence of COF1 or COF2 (such as thalidomide and derivatives thereof (e.g., lenalidomide, pomalidomide, and thalidomide)), or in the presence of COF3 (e.g., a compound disclosed in Table 29), the COF1/CRBN-, COF2/CRBN-, or COF3/CRBN-binding polypeptide increases degradation, e.g., ubiquitination-mediated degradation, of the fusion polypeptide; and/or alters the level and/or activity of the fusion polypeptide. In some embodiments, the degradation of the fusion polypeptide is ubiquitin-dependent.

[0649] Without wishing to be bound by theory, in some embodiments, the COF1/CRBN-, COF2/CRBN- or COF3/CRBN-binding polypeptide provides an amino acid sequence and/or a structural motif that, in the presence of COF1 or COF2 (such as thalidomide and derivatives thereof (e.g., lenalidomide, pomalidomide, and thalidomide)), or in the presence of COF3 (e.g., a compound disclosed in Table 29), results in a post-translational modification (e.g., ubiquitination) of the fusion polypeptide, resulting in a modified, e.g., ubiquitinated, fusion polypeptide. For example, one or more amino acids, e.g., lysine or methionine, in the fusion polypeptide can be ubiquitinated, in the presence of COF1, COF2, or COF3. In some embodiments, the ubiquitinated fusion polypeptide is selectively degraded. In some embodiments, the post-translational modification of the fusion polypeptide increases the degradation (e.g., an increased level and/or rate of degradation) of the fusion polypeptide (e.g., all or a part of the heterologous polypeptide). In some embodiments, the increase in the level and/or rate of degradation is at least 5%, 10%, 15%, 20%, 25%, 30%, 35%, 40%, 45%, 50%, 55%, 60%, 65%, 70%, 75%, 80%, 85%, 90%, 95%, 100%, 200%, 500%, 10 times, 100 times, 1,000 times, or higher than the level and/or rate of degradation of a reference protein, e.g., the fusion polypeptide in the absence of COF1, COF2, or COF3, the heterologous polypeptide, a fusion of the heterologous polypeptide without the COF1/CRBN-, COF2/CRBN-, or COF3/CRBN-binding polypeptide, or a fusion of the heterologous polypeptide with a moiety other than the COF1/CRBN-, COF2/CRBN-, or COF3/CRBN-binding polypeptide.

[0650] Without wishing to be bound by theory, degradation of the fusion polypeptide can include one, two or all of the following steps: (1) binding of COF1 or COF2 (e.g., thalidomide and derivatives thereof (e.g., lenalidome)), or COF3 (e.g., a compound disclosed in Table 29) to one or more subunits of a ubiquitin ligase complex (e.g., an E3 ubiquitin ligase complex), e.g., binding to CUL4, RBX1, DDBI and/or CRBN, also known as CRL4(CRBN), typically, a DDB1-CRBN complex, thereby forming a COF1-ligase or COF2-ligase complex;
[0651] (2) the COF1-ligase, COF2-ligase, or COF3-ligase complex binds to and increases ubiquitination of one or more amino acids, e.g., lysine or methionine, in the fusion polypeptide, thereby forming a ubiquitinated fusion polypeptide, e.g., a mono- or a poly-ubiquitinated fusion polypeptide; and
[0652] (3) the ubiquitinated fusion polypeptide is targeted for degradation, e.g., the fusion polypeptide is selectively targeted, e.g., to a proteasome, for degradation.

[0653] In some embodiments, the COF1/CRBN- or COF2/CRBN-binding polypeptide comprises about 10 to about 95 amino acid residues, about 15 to about 90 amino acid residues, about 20 to about 85 amino acid residues, about 25 to about 80 amino acid residues, about 30 to about 75 amino acid residues, about 35 to about 70 amino acid residues, about 40 to about 65 amino acid residues, about 45 to about 65 amino acid residues, about 50 to about 65 amino acid residues, or about 55 to about 65 amino acid residues of IKZF1 (e.g., SEQ ID NO: 20) or IKZF3 (e.g., SEQ ID NO: 19).

[0654] In some embodiments, the COF3/CRBN-binding polypeptide comprises about 10 to about 95 amino acid residues, about 15 to about 90 amino acid residues, about 20 to about 85 amino acid residues, about 25 to about 80 amino acid residues, about 30 to about 75 amino acid residues, about 35 to about 70 amino acid residues, about 40 to about 65 amino acid residues, about 45 to about 65 amino acid residues, about 50 to about 65 amino acid residues, or about 55 to about 65 amino acid residues of IKZF2 (e.g., SEQ ID NO: 21).

[0655] In some embodiments, the COF1/CRBN- or COF2/CRBN-binding polypeptide comprises a beta turn (e.g., a beta turn of IKZF3). In some embodiments, the COF1/CRBN- or COF2/CRBN-binding polypeptide comprises a beta turn (e.g., a beta turn of IKZF3) and an alpha helix (e.g., an alpha helix of IKZF3). In some embodiments, the COF1/CRBN- or COF2/CRBN-binding polypeptide comprises amino acid residues 136 to 170 or 136 to 180 and/or 236-249 of IKZF3 (numbered according to SEQ ID NO: 19) or an amino acid sequence substantially identical thereto (e.g., least 85, 87, 90, 95, 97, 98, 99, or 100% identical thereto). In some embodiments, the COF1/CRBN- or COF2/CRBN-binding polypeptide comprises an amino acid sequence selected from the group consisting of SEQ ID NOs: 1-6, 11-15, 40, 41-43, 77, 78, 84-86, and 100 or an amino acid sequence substantially identical thereto (e.g., least 85, 87, 90, 95, 97, 98, 99, or 100% identical thereto).

[0656] In some embodiments, the COF3/CRBN-binding polypeptide comprises a beta turn (e.g., a beta turn of IKZF2). In some embodiments, the COF3/CRBN-binding polypeptide comprises a beta turn (e.g., a beta turn of IKZF2) and an alpha helix (e.g., an alpha helix of IKZF2). In some embodiments, the COF3/CRBN-binding polypeptide comprises amino acid residues 130-174 and/or 230-243 of IKZF2 (numbered according to SEQ ID NO: 21) or an amino acid sequence substantially identical thereto (e.g., least 85, 87, 90, 95, 97, 98, 99, or 100% identical thereto). In some embodiments, the COF3/CRBN-binding polypeptide comprises an amino acid sequence selected from the group consisting of SEQ ID NOs: 109, 113, and 114, or an amino acid sequence substantially identical thereto (e.g., least 85, 87, 90, 95, 97, 98, 99, or 100% identical thereto).

[0657] In some embodiments, the COF1/CRBN- or COF2/CRBN-binding polypeptide comprises a beta turn (e.g., a beta turn of IKZF1). In some embodiments, the COF1/CRBN- or COF2/CRBN-binding polypeptide comprises a beta turn (e.g., a beta turn of IKZF1) and an alpha helix (e.g., an alpha helix of IKZF1).

[0658] In some embodiments, the heterologous polypeptide of the fusion polypeptide is susceptible to a post-translational modification (e.g., ubiquitination at one or more residues) and degradation in the presence of COF1 or COF2 (e.g., thalidomide and derivatives thereof, e.g., lenalidomide, pomalidomide, and thalidomide), or in the presence of COF3 (e.g., a compound disclosed in Table 29).

[0659] Optionally, the COF1/CRBN-, COF2/CRBN-, or COF3/CRBN-binding polypeptide and the heterologous polypeptide can be operatively linked, e.g., via a linker, e.g., a glycine-serine linker (e.g., SEQ ID NO: 28, 37, 38, 39, or 99). For example, the fusion polypeptides can include three elements: a COF1/CRBN-, COF2/CRBN-, or COF3/CRBN-binding polypeptide, e.g., a portion of a degradation amino acid sequence (e.g., a degron), a heterologous polypeptide of interest to be degraded, and a linker separating the two. The heterologous polypeptide can be a cytosolic protein, a nuclear protein, a transmembrane protein (e.g., including one or more transmembrane domains), or a secreted protein. For example, heterologous polypeptides of interest can include, e.g., a chimeric antigen receptor (CAR), a CRISPR associated protein, CD8, CD19, CD22, a transcription factor (e.g., STAT3, STAT5, NF-kappaB, beta-catenin, Notch, GLI, or c-JUN), e.g., as described herein.

[0660] In some embodiments, the fusion polypeptide of this invention further comprises a degradation domain. In some embodiments, the degradation domain has a first state associated with a first level of expression of the fusion polypeptide and a second state associated with a second level of expression of the fusion polypeptide, wherein the second level is increased, e.g., by at least 2-, 3-, 4-, 5-, 10-, 20- or 30-fold over the first level in the presence of a stabilization compound. In some embodiments, the degradation domain is separated from the COF1/CRBN-binding polypeptide and the heterologous polypeptide by a heterologous cleavage site. In some embodiments, the degradation domain is separated from the COF2/CRBN-binding polypeptide and the heterologous polypeptide by a heterologous cleavage site. In some embodiments, the degradation domain is separated from the COF3/CRBN-binding polypeptide and the heterologous polypeptide by a heterologous cleavage site.

[0661] In some embodiments, the fusion polypeptide comprises a first domain and a second domain, wherein the first domain comprises a degradation domain and the second domain comprises a COF1/CRBN-, COF2/CRBN-, or COF3/CRBN-binding polypeptide and a heterologous polypeptide. In some embodiments, the first domain and the second domain are separated by a heterologous cleavage site. Without wishing to be bound by theory, the expression level of the fusion polypeptide can be regulated by a stabilization compound and COF1, COF2, or COF3. In some embodiments, in the absence of the stabilization compound, the degradation domain is unable to acquire a proper conformation and is targeted for degradation by intracellular degradation pathways along with the rest of the fusion polypeptide. In some embodiments, in the presence of the stabilization compound, the degradation domain assumes a proper conformation and is less susceptible to degradation by intracellular degradation pathways. In some embodiments, in the presence of the stabilization compound, the proper folding of the degradation domain exposes the heterologous cleavage site, leaving to the cleavage of the heterologous cleavage site and the removal of the degradation domain from the rest of the fusion polypeptide. The level of the fusion polypeptide can be further regulated by COF1, COF2, or COF3 as described above.

[0662] In some embodiments, the degradation domain is chosen from an estrogen receptor (ER) domain, an FKB protein (FKBP) domain, or a dihydrofolate reductase (DHFR) domain. In some embodiments, the degradation domain is an estrogen receptor (ER) domain, e.g., the degradation domain comprises an amino acid sequence that is at least 90, 95, 97, 98, 99, or 100% identical to SEQ ID NO: 46 or 48, e.g., the degradation domain comprises the amino acid sequence of SEQ ID NO: 46. In some embodiments, the degradation domain is an estrogen receptor (ER) domain and the stabilization compound is bazedoxifene or 4-hydroxy tamoxifen (4-OHT). In some embodiments, the degradation domain is an FKB protein (FKBP) domain, e.g., the degradation domain comprises an amino acid sequence that is at least 90, 95, 97, 98, 99, or 100% identical to SEQ ID NO: 50, e.g., the degradation domain comprises the amino acid sequence of SEQ ID NO: 50. In some embodiments, the degradation domain is an FKB protein (FKBP) domain and the stabilization compound is Shield-1. In some embodiments, the degradation domain is a dihydrofolate reductase (DHFR) domain, e.g., the degradation domain comprises an amino acid sequence that is at least 90, 95, 97, 98, 99, or 100% identical to SEQ ID NO: 51, e.g., the degradation domain comprises the amino acid sequence of SEQ ID NO: 51. In some embodiments, the degradation domain is a dihydrofolate reductase (DHFR) domain and the stabilization compound is trimethoprim.

[0663] Accordingly, disclosed herein are fusion polypeptides that include a heterologous polypeptide, a COF1/CRBN-, COF2/CRBN-, or COF3/CRBN-binding polypeptide, and/or a degradation domain, e.g., polypeptides of interest for selective protein degradation, as well as nucleic acid molecules encoding the fusion polypeptides, vectors and cells, e.g., host cells, that include the aforesaid fusion polypeptides. The fusion polypeptides and related compositions disclosed herein can be used to activate or inactivate, e.g., degrade, a variety of target proteins for regulating therapies, e.g., secreted, cellular, or transmembrane therapies (e.g., CAR therapies), regulating gene expression (e.g., via regulating the expression and/or activity of a component of the CRISPR/CAS system), validating target, as well as screening libraries. Methods for selectively regulating (e.g., degrading) said fusion polypeptides for, e.g., treating a subject are additionally disclosed.

[0664] The compositions and methods disclosed herein offer novel and inventive features over art known regulation systems, including the fact that the COF1/CRBN-, COF2/CRBN-, or COF3/CRBN-binding polypeptide is acting at the protein level (as opposed to mRNA) and leads to active degradation of existing and newly made proteins in a cell (as opposed to blocking the production of a nascent protein). In addition, the COF1/CRBN-, COF2/CRBN-, or COF3/CRBN-binding polypeptide can have a short length and COF1, COF2, and COF3 are typically of low molecular weights.

[0665] Without wishing to be bound by theory, as described in Example 16, COF1 or COF2 (e.g., thalidomide and derivatives thereof (e.g., lenalidomide, pomalidomide, and thalidomide)) does not lead to, or does not substantially lead to degradation of a fusion polypeptide comprising a COF3/CRBN-binding polypeptide described herein (e.g., a fusion polypeptide comprising a CARB tag described herein, e.g., a fusion polypeptide comprising a CARB tag comprising an amino acid sequence selected from the group consisting of SEQ ID NOs: 109, 113, and 114). In some embodiments, the degradation of a fusion polypeptide comprising a COF3/CRBN-binding polypeptide described herein in the presence of COF1 or COF2 is no more than 1, 2, 3, 4, 5, 6, 7, 8, 9, 10, 15, or 20% of the degradation of said fusion polypeptide in the presence of COF3 under same conditions.

[0666] Similarly, COF3 (e.g., a compound disclosed in Table 29) does not lead to, or does not substantially lead to degradation of a fusion polypeptide comprising a COF1/CRBN- or COF2/CRBN-binding polypeptide described herein (e.g., a fusion polypeptide comprising a HilD tag described herein, e.g., a fusion polypeptide comprising a HilD tag comprising an amino acid sequence selected from the group consisting of SEQ ID NOs: 1-6, 11-15, 40, 41-43, 77, 78, 84-86, and 100). In some embodiments, the degradation of a fusion polypeptide comprising a COF1/CRBN- or COF2/CRBN-binding polypeptide described herein in the presence of COF3 is no more than 1, 2, 3, 4, 5, 6, 7, 8, 9, 10, 15, or 20% of the degradation of said fusion polypeptide in the presence of COF1 or COF2 under same conditions.

[0667] As a consequence, two target polypeptides, one tagged with a COF1/CRBN- or COF2/CRBN-binding polypeptide (e.g., a HilD tag descried herein), the other tagged with a COF3/CRBN-binding polypeptide (e.g., a CARB tag described herein), can be regulated independently using COF1 or COF2 and COF3. For example, a cell expressing a HilD-tagged protein and a CARB-tagged protein can be manipulated to express only the HilD-tagged protein (e.g., by contacting the cell with COF3), express only the CARB-tagged protein (e.g., by contacting the cell with COF1 or COF2), or express neither protein (e.g., by contacting the cell with COF1 or COF2 and COF3).

### Definitions

[0668] Unless defined otherwise, all technical and scientific terms used herein have the same meaning as commonly understood by one of ordinary skill in the art to which the invention pertains. As used herein, the term “compound of Formula (I) (COF1)/CRBN-binding polypeptide” refers to a polypeptide that binds to COF1, a polypeptide that binds to a complex of COF1 and CRBN, or a polypeptide that binds to CRBN in the presence of COF1. In some embodiments, the COF1/CRBN-binding polypeptide binds to COF1 with an affinity (K_{D}) that is lower than 10⁻³, 10⁻⁴, 10⁻⁵, 10⁻⁶, 10⁻⁷, or 10⁻⁸ M, e.g., as measured by a method recognized in the art, e.g., Biacore. In some embodiments, the COF1/CRBN-binding polypeptide binds to the complex of COF1 and CRBN with an affinity (K_{D}) that is lower than 10⁻³, 10⁻⁴, 10⁻⁵, 10⁻⁶, 10⁻⁷, or 10⁻⁸ M, e.g., as measured by a method recognized in the art, e.g., Biacore. In some embodiments, the COF1/CRBN-binding polypeptide binds to CRBN in the presence of COF1 with an affinity (K_{D}) that is lower than 10⁻³, 10⁻⁴, 10⁻¹, 10⁻⁶, 10⁻⁷, or 10⁻⁸ M, e.g., as measured by a method recognized in the art, e.g., Biacore. In some embodiments, the COF1/CRBN-binding polypeptide, when present in a fusion polypeptide (e.g., operably linked to a heterologous polypeptide (e.g., a fusion polypeptide as described herein)), can result in an increase in ubiquitination of the fusion polypeptide. In some embodiments, the COF1/CRBN-binding polypeptide, when present in a fusion polypeptide (e.g., operably linked to a heterologous polypeptide (e.g., a fusion polypeptide as described herein)), can result in an increase in degradation of the fusion polypeptide. In some embodiments, the COF1/CRBN-binding polypeptide, when present in a fusion polypeptide (e.g., operably linked to a heterologous polypeptide (e.g., a fusion polypeptide as described herein)), can result in an increase in inactivation of the fusion polypeptide. In some embodiments, the increase in ubiquitination, degradation, and/or inactivation occurs in the presence of COF1 and one or more components of a ubiquitination ligase complex (e.g., CRBN). In some embodiments, the increase in ubiquitination, degradation, and/or inactivation is at least 5%, 10%, 15%, 20%, 25%, 30%, 35%, 40%, 45%, 50%, 55%, 60%, 65%, 70%, 75%, 80%, 85%, 90%, 95%, 100%, 200%, 500%, 10 times, 100 times, 1,000 times, or higher than ubiquitination, degradation, and/or inactivation of a reference polypeptide, e.g., a reference fusion polypeptide with the COF1/CRBN-binding polypeptide in the absence of COF1, or a reference polypeptide without the COF1/CRBN-binding polypeptide. In some embodiments, the degradation of the fusion polypeptide containing the COF1/CRBN-binding polypeptide is ubiquitin-dependent. For example, one or more amino acids, e.g., lysine or methionine, in the fusion polypeptide with the COF1/CRBN-binding polypeptide are ubiquitinated, in the presence of COF1.

[0669] As used herein, the term “compound of Formula (II) (COF2)/CRBN-binding polypeptide” refers to a polypeptide that binds to COF2, a polypeptide that binds to a complex of COF2 and CRBN, or a polypeptide that binds to CRBN in the presence of COF2. In some embodiments, the COF2/CRBN-binding polypeptide binds to COF2 with an affinity (K_{D}) that is lower than 10⁻³, 10⁻⁴, 10⁻⁵, 10⁻⁶, 10⁻⁷, or 10⁻⁸ M, e.g., as measured by a method recognized in the art, e.g., Biacore. In some embodiments, the COF2/CRBN-binding polypeptide binds to the complex of COF2 and CRBN with an affinity (K_{D}) that is lower than 10⁻³, 10⁻⁴, 10⁻⁵, 10⁻⁶, 10⁻⁷, or 10⁻⁸ M, e.g., as measured by a method recognized in the art, e.g., Biacore. In some embodiments, the COF2/CRBN-binding polypeptide binds to CRBN in the presence of COF2 with an affinity (K_{D}) that is lower than 10⁻³, 10⁻⁴, 10⁻⁵, 10⁻⁶, 10⁻⁷, or 10⁻⁸ M, e.g., as measured by a method recognized in the art, e.g., Biacore. In some embodiments, the COF2/CRBN-binding polypeptide, when present in a fusion polypeptide (e.g., operably linked to a heterologous polypeptide (e.g., a fusion polypeptide as described herein)), can result in an increase in ubiquitination of the fusion polypeptide. In some embodiments, the COF2/CRBN-binding polypeptide, when present in a fusion polypeptide (e.g., operably linked to a heterologous polypeptide (e.g., a fusion polypeptide as described herein)), can result in an increase in degradation of the fusion polypeptide. In some embodiments, the COF2/CRBN-binding polypeptide, when present in a fusion polypeptide (e.g., operably linked to a heterologous polypeptide (e.g., a fusion polypeptide as described herein)), can result in an increase in inactivation of the fusion polypeptide. In some embodiments, the increase in ubiquitination, degradation, and/or inactivation occurs in the presence of COF2 and one or more components of a ubiquitination ligase complex (e.g., CRBN). In some embodiments, the increase in ubiquitination, degradation, and/or inactivation is at least 5%, 10%, 15%, 20%, 25%, 30%, 35%, 40%, 45%, 50%, 55%, 60%, 65%, 70%, 75%, 80%, 85%, 90%, 95%, 100%, 200%, 500%, 10 times, 100 times, 1,000 times, or higher than ubiquitination, degradation, and/or inactivation of a reference polypeptide, e.g., a reference fusion polypeptide with the COF2/CRBN-binding polypeptide in the absence of COF2, or a reference polypeptide without the COF2/CRBN-binding polypeptide. In some embodiments, the degradation of the fusion polypeptide containing the COF2/CRBN-binding polypeptide is ubiquitin-dependent. For example, one or more amino acids, e.g., lysine or methionine, in the fusion polypeptide with the COF2/CRBN-binding polypeptide are ubiquitinated, in the presence of COF2.

[0670] As used herein, the term “compound of Formula (III) (COF3)/CRBN-binding polypeptide” refers to a polypeptide that binds to COF3, a polypeptide that binds to a complex of COF3 and CRBN, or a polypeptide that binds to CRBN in the presence of COF3. In some embodiments, the COF3/CRBN-binding polypeptide binds to COF3 with an affinity (K_{D}) that is lower than 10⁻³, 10⁻⁴, 10⁻⁵, 10⁻⁶, 10⁻⁷, or 10⁻⁸ M, e.g., as measured by a method recognized in the art, e.g., Biacore. In some embodiments, the COF3/CRBN-binding polypeptide binds to the complex of COF3 and CRBN with an affinity (K_{D}) that is lower than 10⁻³, 10⁻⁴, 10⁻⁵, 10⁻⁶, 10⁻⁷, or 10⁻⁸ M, e.g., as measured by a method recognized in the art, e.g., Biacore. In some embodiments, the COF3/CRBN-binding polypeptide binds to CRBN in the presence of COF3 with an affinity (K_{D}) that is lower than 10⁻³, 10⁻⁴, 10⁻⁵, 10⁻⁶, 10⁻⁷, or 10⁻⁸ M, e.g., as measured by a method recognized in the art, e.g., Biacore. In some embodiments, the COF3/CRBN-binding polypeptide, when present in a fusion polypeptide (e.g., operably linked to a heterologous polypeptide (e.g., a fusion polypeptide as described herein)), can result in an increase in ubiquitination of the fusion polypeptide. In some embodiments, the COF3/CRBN-binding polypeptide, when present in a fusion polypeptide (e.g., operably linked to a heterologous polypeptide (e.g., a fusion polypeptide as described herein)), can result in an increase in degradation of the fusion polypeptide. In some embodiments, the COF3/CRBN-binding polypeptide, when present in a fusion polypeptide (e.g., operably linked to a heterologous polypeptide (e.g., a fusion polypeptide as described herein)), can result in an increase in inactivation of the fusion polypeptide. In some embodiments, the increase in ubiquitination, degradation, and/or inactivation occurs in the presence of COF3 and one or more components of a ubiquitination ligase complex (e.g., CRBN). In some embodiments, the increase in ubiquitination, degradation, and/or inactivation is at least 5%, 10%, 15%, 20%, 25%, 30%, 35%, 40%, 45%, 50%, 55%, 60%, 65%, 70%, 75%, 80%, 85%, 90%, 95%, 100%, 200%, 500%, 10 times, 100 times, 1,000 times, or higher than ubiquitination, degradation, and/or inactivation of a reference polypeptide, e.g., a reference fusion polypeptide with the COF3/CRBN-binding polypeptide in the absence of COF3, or a reference polypeptide without the COF3/CRBN-binding polypeptide. In some embodiments, the degradation of the fusion polypeptide containing the COF3/CRBN-binding polypeptide is ubiquitin-dependent. For example, one or more amino acids, e.g., lysine or methionine, in the fusion polypeptide with the COF3/CRBN-binding polypeptide are ubiquitinated, in the presence of COF3.

[0671] As used herein, “ubiquitination” refers to the addition of a ubiquitin molecule, e.g., a single ubiquitin (mono-ubiquitination) or more than one ubiquitin (e.g., a chain of ubiquitin molecules, or poly-ubiquitination). Ubiquitination can be performed by an enzyme machinery including one or more of a ubiquitin-activating enzyme (E1), a ubiquitin-conjugating enzyme (E2), and a ubiquitin ligase (E3).

[0672] As used herein, the term “CRBN” refers to a protein that in humans is encoded by the CRBN gene, or fragment or variant thereof (e.g., an amino acid sequence substantially identical thereto, e.g., least 85, 87, 90, 95, 97, 98, 99, or 100% identical thereto). Swiss-Prot accession number Q96SW2 provides exemplary human CRBN amino acid sequences.

[0673] As used herein, an “IKZF polypeptide” refers to an IKZF, or fragment or variant thereof (e.g., an amino acid sequence substantially identical thereto, e.g., least 85, 87, 90, 95, 97, 98, 99, or 100% identical thereto).

[0674] As used herein, the term “IKZF3” refers to a protein that in humans is encoded by the IKZF3 gene. Swiss-Prot accession number Q9UKT9 provides exemplary human IKZF3 amino acid sequences.

[0675] An exemplary human IKZF3 amino acid sequence is provided in SEQ ID NO: 19. The term “IKZF3 polypeptide” refers to IKZF3, or fragment or variant thereof (e.g., an amino acid sequence substantially identical thereto, e.g., least 85, 87, 90, 95, 97, 98, 99, or 100% identical thereto).

[0676] As used herein, the term “IKZF1” refers to a protein that in humans is encoded by the IKZF1 gene. Swiss-Prot accession number Q13422 provides exemplary human IKZF1 amino acid sequences. An exemplary human IKZF1 amino acid sequence is provided in SEQ ID NO: 20. The term “IKZF1 polypeptide” refers to IKZF1, or fragment or variant thereof (e.g., an amino acid sequence substantially identical thereto, e.g., least 85, 87, 90, 95, 97, 98, 99, or 100% identical thereto).

[0677] As used herein, the term “IKZF2” refers to a protein that in humans is encoded by the IKZF2 gene. Swiss-Prot accession number Q9UKS7 provides exemplary human IKZF2 amino acid sequences. An exemplary human IKZF2 amino acid sequence is provided in SEQ ID NO: 21. The term “IKZF2 polypeptide” refers to IKZF2, or fragment or variant thereof (e.g., an amino acid sequence substantially identical thereto, e.g., least 85, 87, 90, 95, 97, 98, 99, or 100% identical thereto).

[0678] As used herein, the term “IKZF4” refers to a protein that in humans is encoded by the IKZF4 gene. Swiss-Prot accession number Q9H2S9 provides exemplary human IKZF4 amino acid sequences. An exemplary human IKZF4 amino acid sequence is provided in SEQ ID NO: 22. The term “IKZF4 polypeptide” refers to IKZF4, or fragment or variant thereof (e.g., an amino acid sequence substantially identical thereto, e.g., least 85, 87, 90, 95, 97, 98, 99, or 100% identical thereto).

[0679] As used herein, the term “IKZF5” refers to a protein that in humans is encoded by the IKZF5 gene. Swiss-Prot accession number Q9H5V7 provides exemplary human IKZF5 amino acid sequences. An exemplary human IKZF5 amino acid sequence is provided in SEQ ID NO: 23. The term “IKZF5 polypeptide” refers to IKZF5, or fragment or variant thereof (e.g., an amino acid sequence substantially identical thereto, e.g., least 85, 87, 90, 95, 97, 98, 99, or 100% identical thereto).

[0680] As used herein, a “fusion polypeptide” or “chimeric polypeptide” refers to a polypeptide that includes two or more heterologous amino acid sequences and/or protein domains in a single, continuous polypeptide. In some embodiments, the two or more heterologous protein domains are covalently linked directly or indirectly, e.g., via a linker.

[0681] As used herein, the term “estrogen receptor (ER)” refers to a protein that in humans is encoded by the ESR1 gene. Swiss-Prot accession number P03372 provides exemplary human estrogen receptor (ER) amino acid sequences. An “estrogen receptor (ER) domain” refers to estrogen receptor, or fragment or variant thereof (e.g., an amino acid sequence substantially identical thereto, e.g., least 85, 87, 90, 95, 97, 98, 99, or 100% identical thereto). Exemplary estrogen receptor (ER) domain amino acid sequences are provided in SEQ ID NOs: 44, 46, and 48. Exemplary estrogen receptor (ER) domain nucleotide sequences are provided in SEQ ID NOs: 45, 47, and 49.

[0682] As used herein, an “FKB protein (FKBP) domain” refers to FKBP, or fragment or variant thereof. An exemplary FKB protein (FKBP) domain amino acid sequence is provided in SEQ ID NO: 50.

[0683] As used herein, the term “dihydrofolate reductase (DHFR)” refers to a protein that in humans is encoded by the DHFR gene. Swiss-Prot accession number P00374 provides exemplary human dihydrofolate reductase (DHFR) amino acid sequences. A “dihydrofolate reductase (DHFR) domain” refers to DHFR, or fragment or variant thereof. An exemplary dihydrofolate reductase (DHFR) domain amino acid sequence is provided in SEQ ID NO: 51.

[0684] As used herein, the term “degradation domain” refers to a domain of a fusion polypeptide that assumes a stable conformation when expressed in the presence of a stabilization compound. Absent the stable conformation when expressed in a cell of interest, a large fraction of degradation domains (and, typically, any protein to which they are fused to) will be degraded by endogenous cellular machinery. Notably, a degradation domain is not a naturally occurring domain of a protein but is rather engineered to be unstable absent contact with the stabilization compound. Thus, a degradation domain is identifiable by the following characteristics: (1) it is not naturally occurring; (2) its expression is regulated co-translationally or post-translationally through increased or decreased degradation rates; (3) the rate of degradation is substantially decreased in the presence of a stabilization compound. In some embodiments, absent a stabilization compound, the degradation domain or other domain of the fusion polypeptide is not substantially detectable in or on the cell. In some embodiments, the degradation domain is in a destabilized state in the absence of a stabilization compound. In some embodiments, the degradation domain does not self-associate, e.g., does not homodimerize, in the absence of a stabilization compound. In some embodiments, the degradation domain is fused to a heterologous protease cleavage site, wherein in the presence of the stabilization compound, the cleavage of the heterologous protease cleavage site is more efficient than in the absence of the stabilization compound.

[0685] The degradation domain is not an aggregation domain as defined in PCT Application Number PCT/US2017/027778.

[0686] By “stabilization compound” or “stabilizing compound” is meant a compound that, when added to a cell expressing a degradation domain, stabilizes the degradation domain and any protein that is fused to it, and decreases the rate at which it is subsequently degraded. Stabilization compounds or stabilizing compounds can be naturally occurring or synthetic.

[0687] By the term “heterologous polypeptide” is meant an amino acid sequence (e.g., a protein domain) that is different from a COF1/CRBN-, COF2/CRBN-, or COF3/CRBN-binding polypeptide (e.g., by at least one amino acid) and that is not an active luciferase domain or has a luciferase sequence. In some embodiments, the heterologous polypeptide is not a reporter polypeptide, e.g., a luciferase, a green fluorescent protein, or a b-galactosidase. In some embodiments, the heterologous polypeptide comprises an amino acid sequence from, or derived from, a mammalian polypeptide, a bacterial polypeptide, a viral polypeptide, a plant polypeptide, a yeast polypeptide, a fungi polypeptide, an archaebacterial polypeptide, or a fish, e.g., Zebrafish, polypeptide. In some embodiments, the heterologous polypeptide comprises a polypeptide in Table 2, e.g., a cytoplasmic and/or nuclear polypeptide, a secretory polypeptide, or a transmembrane polypeptide as described in Table 2.

[0688] Furthermore, by “heterologous protease cleavage site” is meant a protease cleavage site that has a different origin than one or more protein domains to which it is fused (e.g., is not naturally fused to at least one of the other referenced domains) By “protease” is meant a protein that cleaves another protein based on the presence of a cleavage site in the to-be-cleaved protein.

[0689] By “intracellular protease” is meant a protease that is natively expressed inside a cell of interest.

[0690] By “extracellular protease” is meant a protease that is natively expressed in an organism (e.g., a mammal) and secreted or exposed to the outside of cells (e.g., in the blood or the surface of the skin).

[0691] As used herein, the term “cleavage” refers to the breakage of covalent bonds, such as in the backbone of a nucleic acid molecule or the hydrolysis of peptide bonds. Cleavage can be initiated by a variety of methods, including, but not limited to, enzymatic or chemical hydrolysis of a phosphodiester bond. Both single-stranded cleavage and double-stranded cleavage are possible. Double-stranded cleavage can occur as a result of two distinct single-stranded cleavage events.

[0692] Additional terms are described herein below.

[0693] The term “a” and “an” refers to one or to more than one (i.e., to at least one) of the grammatical object of the article. By way of example, “an element” means one element or more than one element.

[0694] The term “about” when referring to a measurable value such as an amount, a temporal duration, and the like, is meant to encompass variations of ±20% or in some instances ±10%, or in some instances ±5%, or in some instances ±1%, or in some instances ±0.1% from the specified value, as such variations are appropriate to perform the disclosed methods.

[0695] The term “antibody,” as used herein, refers to a protein, or polypeptide sequence derived from an immunoglobulin molecule which specifically binds with an antigen. Antibodies can be polyclonal or monoclonal, multiple or single chain, or intact immunoglobulins, and may be derived from natural sources or from recombinant sources. Antibodies can be tetramers of immunoglobulin molecules.

[0696] The term “antibody fragment” refers to at least one portion of an antibody, that retains the ability to specifically interact with (e.g., by binding, steric hindrance, stabilizing/destabilizing, spatial distribution) an epitope of an antigen. Examples of antibody fragments include, but are not limited to, Fab, Fab′, F(ab′)₂, Fv fragments, scFv antibody fragments, disulfide-linked Fvs (sdFv), a Fd fragment consisting of the VH and CHI domains, linear antibodies, single domain antibodies such as sdAb (either VL or VH), camelid VHH domains, multi-specific antibodies formed from antibody fragments such as a bivalent fragment comprising two Fab fragments linked by a disulfide bridge at the hinge region, and an isolated CDR or other epitope binding fragments of an antibody. An antigen binding fragment can also be incorporated into single domain antibodies, maxibodies, minibodies, nanobodies, intrabodies, diabodies, triabodies, tetrabodies, v-NAR and bis-scFv (see, e.g., Hollinger and Hudson, Nature Biotechnology 23:1126-1136, 2005). Antigen binding fragments can also be grafted into scaffolds based on polypeptides such as a fibronectin type III (Fn3)(see U.S. Pat. No. 6,703,199, which describes fibronectin polypeptide minibodies).

[0697] The term “antibody heavy chain,” refers to the larger of the two types of polypeptide chains present in antibody molecules in their naturally occurring conformations, and which normally determines the class to which the antibody belongs.

[0698] The term “antibody light chain,” refers to the smaller of the two types of polypeptide chains present in antibody molecules in their naturally occurring conformations. Kappa (K) and lambda (λ) light chains refer to the two major antibody light chain isotypes.

[0699] The term “antigen,” “Ag,” or “antigen molecule” refers to a molecule that provokes an immune response. This immune response may involve either antibody production, or the activation of specific immunologically-competent cells, or both. In some embodiments, an antigen is any macromolecule, including all proteins or peptides. In other embodiments, antigens are derived from recombinant or genomic DNA. Any DNA, which comprises nucleotide sequences or a partial nucleotide sequence encoding a protein that elicits an immune response therefore encodes an “antigen” as that term is used herein.

[0700] An antigen need not be encoded solely by a full length nucleotide sequence of a gene. In embodiments, antigens include, but are not limited to, the use of partial nucleotide sequences of more than one gene and that these nucleotide sequences are arranged in various combinations to encode polypeptides that elicit the desired immune response. In an embodiment, an antigen need not be encoded by a “gene” at all. In one embodiment, an antigen can be generated synthesized or can be derived from a biological sample, or might be macromolecule besides a polypeptide. Such a biological sample can include, but is not limited to a tissue sample, a tumor sample, a cell or a fluid with other biological components. In embodiments, antigens include, for example, carbohydrates (e.g., monosaccharides, disaccharides, oligosaccharides, and polysaccharides).

[0701] The term “antigen presenting cell” or “APC” refers to an immune system cell such as an accessory cell (e.g., a B-cell, a dendritic cell, and the like) that displays a foreign antigen complexed with major histocompatibility complexes (MHC's) on its surface. T-cells may recognize these complexes using their T-cell receptors (TCRs). APCs process antigens and present them to T-cells.

[0702] The term “Chimeric Antigen Receptor” or alternatively a “CAR” refers to a set of polypeptides, typically two in the simplest embodiments, which when in an immune effector cell, provides the cell with specificity for a target cell, typically a cancer cell, and with intracellular signal generation. In some embodiments, a CAR comprises at least an extracellular antigen binding domain, a transmembrane domain and a cytoplasmic signaling domain (also referred to herein as “an intracellular signaling domain”) comprising a functional signaling domain derived from a stimulatory molecule and/or costimulatory molecule as defined below. In some embodiments, the set of polypeptides are in the same polypeptide chain (e.g., comprise a chimeric fusion protein). In some embodiments, the set of polypeptides are not contiguous with each other, e.g., are in different polypeptide chains. In some embodiments, the set of polypeptides are not contiguous with each other, e.g., are in different polypeptide chains. In some embodiments, the set of polypeptides include a dimerization switch that, upon the presence of a dimerization molecule, can couple the fusion polypeptides to one another, e.g., can couple an antigen binding domain to an intracellular signaling domain. In one aspect, the stimulatory molecule is the zeta chain associated with the T cell receptor complex. In one aspect, the cytoplasmic signaling domain comprises a primary signaling domain (e.g., a primary signaling domain of CD3-zeta). In one aspect, the cytoplasmic signaling domain further comprises one or more functional signaling domains derived from at least one costimulatory molecule as defined below. In one aspect, the costimulatory molecule of the CAR is chosen from the costimulatory molecules described herein, e.g., 4-1BB (i.e., CD137), CD27, ICOS, and/or CD28. In one aspect, the CAR comprises a chimeric fusion protein comprising an extracellular antigen binding domain, a transmembrane domain and an intracellular signaling domain comprising a functional signaling domain derived from a stimulatory molecule. In one aspect, the CAR comprises a chimeric fusion protein comprising an extracellular antigen binding domain, a transmembrane domain and an intracellular signaling domain comprising a functional signaling domain derived from a costimulatory molecule and a functional signaling domain derived from a stimulatory molecule. In one aspect, the CAR comprises a chimeric fusion protein comprising an extracellular antigen binding domain, a transmembrane domain and an intracellular signaling domain comprising two functional signaling domains derived from one or more costimulatory molecule(s) and a functional signaling domain derived from a stimulatory molecule. In one aspect, the CAR comprises a chimeric fusion protein comprising an extracellular antigen binding domain, a transmembrane domain and an intracellular signaling domain comprising at least two functional signaling domains derived from one or more costimulatory molecule(s) and a functional signaling domain derived from a stimulatory molecule. In one aspect the CAR comprises an optional leader sequence at the amino-terminus (N-ter) of the CAR fusion protein. In one aspect, the CAR further comprises a leader sequence at the N-terminus of the extracellular antigen binding domain, wherein the leader sequence is optionally cleaved from the antigen binding domain (e.g., a scFv) during cellular processing and localization of the CAR to the cellular membrane.

[0703] The term “cancer” refers to a disease characterized by the uncontrolled growth of aberrant cells. Cancer cells can spread locally or through the bloodstream and lymphatic system to other parts of the body. Examples of various cancers are described herein and include but are not limited to, breast cancer, prostate cancer, ovarian cancer, cervical cancer, skin cancer, pancreatic cancer, colorectal cancer, renal cancer, liver cancer, brain cancer, lymphoma, leukemia, lung cancer and the like. The terms “tumor” and “cancer” are used interchangeably herein, e.g., both terms encompass solid and liquid, e.g., diffuse or circulating, tumors. As used herein, the term “cancer” or “tumor” includes premalignant, as well as malignant cancers and tumors.

[0704] “CAR molecule”, depending on the context, refers to a CAR (e.g., a CAR polypeptide), a nucleic acid encoding a CAR, or both.

[0705] A CAR that comprises an antigen binding domain (e.g., a scFv, or TCR) that targets a specific tumor antigen X, such as those described herein, is also referred to as XCAR. For example, a CAR that comprises an antigen binding domain that targets CD19 or BCMA is referred to as CD19CAR or BCMACAR, respectively.

[0706] As used herein, the term “BCMA” refers to B-cell maturation antigen. BCMA (also known as TNFRSF17, BCM or CD269) is a member of the tumor necrosis receptor (TNFR) family and is predominantly expressed on terminally differentiated B cells, e.g., memory B cells, and plasma cells. Its ligand is called B-cell activator of the TNF family (BAFF) and a proliferation inducing ligand (APRIL). BCMA is involved in mediating the survival of plasma cells for maintaining long-term humoral immunity. The gene for BCMA is encoded on chromosome 16 producing a primary mRNA transcript of 994 nucleotides in length (NCBI accession NM_001192.2) that encodes a protein of 184 amino acids (NP_001183.2). A second antisense transcript derived from the BCMA locus has been described, which may play a role in regulating BCMA expression. (Laabi Y. et al., Nucleic Acids Res., 1994, 22:1147-1154). Additional transcript variants have been described with unknown significance (Smirnova A S et al. Mol Immunol., 2008, 45(4):1179-1183. A second isoform, also known as TV4, has been identified (Uniprot identifier Q02223-2). As used herein, “BCMA” includes proteins comprising mutations, e.g., point mutations, fragments, insertions, deletions and splice variants of full length wild-type BCMA.

[0707] As used herein, the term “CD19” refers to the Cluster of Differentiation 19 protein, which is an antigenic determinant detectable on leukemia precursor cells. The human and murine amino acid and nucleic acid sequences can be found in a public database, such as GenBank, UniProt and Swiss-Prot. For example, the amino acid sequence of human CD19 can be found as UniProt/Swiss-Prot Accession No. P15391 and the nucleotide sequence encoding of the human CD19 can be found at Accession No. NM_001178098. As used herein, “CD19” includes proteins comprising mutations, e.g., point mutations, fragments, insertions, deletions and splice variants of full length wild-type CD19.

[0708] CD19 is expressed on most B lineage cancers, including, e.g., acute lymphoblastic leukaemia, chronic lymphocyte leukaemia and non-Hodgkin lymphoma. Other cells with express CD19 are provided below in the definition of “disease associated with expression of CD19.” It is also an early marker of B cell progenitors. See, e.g., Nicholson et al. Mol. Immun. 34 (16-17): 1157-1165 (1997). In one aspect the antigen-binding portion of the CART recognizes and binds an antigen within the extracellular domain of the CD19 protein. In one aspect, the CD19 protein is expressed on a cancer cell.

[0709] As used herein, the term “CD20” refers to an antigenic determinant known to be detectable on B cells. Human CD20 is also called membrane-spanning 4-domains, subfamily A, member 1 (MS4A1). The human and murine amino acid and nucleic acid sequences can be found in a public database, such as GenBank, UniProt and Swiss-Prot. For example, the amino acid sequence of human CD20 can be found at Accession Nos. NP_690605.1 and NP_068769.2, and the nucleotide sequence encoding transcript variants 1 and 3 of the human CD20 can be found at Accession No. NM_152866.2 and NM_021950.3, respectively. In one aspect the antigen-binding portion of the CAR recognizes and binds an antigen within the extracellular domain of the CD20 protein. In one aspect, the CD20 protein is expressed on a cancer cell. As used herein, “CD20” includes proteins comprising mutations, e.g., point mutations, fragments, insertions, deletions and splice variants of full length wild-type CD20.

[0710] As used herein, the terms “CD22,” refers to an antigenic determinant known to be detectable on leukemia precursor cells. The human and murine amino acid and nucleic acid sequences can be found in a public database, such as GenBank, UniProt and Swiss-Prot. For example, the amino acid sequences of isoforms 1-5 human CD22 can be found at Accession Nos. NP 001762.2, NP 001172028.1, NP 001172029.1, NP 001172030.1, and NP 001265346.1, respectively, and the nucleotide sequence encoding variants 1-5 of the human CD22 can be found at Accession No. NM 001771.3, NM 001185099.1, NM 001185100.1, NM 001185101.1, and NM 001278417.1, respectively. In one aspect the antigen-binding portion of the CAR recognizes and binds an antigen within the extracellular domain of the CD22 protein. In one aspect, the CD22 protein is expressed on a cancer cell. As used herein, “CD22” includes proteins comprising mutations, e.g., point mutations, fragments, insertions, deletions and splice variants of full length wild-type CD22.

[0711] As used herein, the term “CD123” refers to an antigenic determinant known to be detectable on some malignant hematological cancer cells, e.g., leukemia cells. The human and murine amino acid and nucleic acid sequences can be found in a public database, such as GenBank, UniProt and Swiss-Prot. For example, the amino acid sequences of human CD123 can be found at Accession Nos. NP_002174.1 (isoform 1 precursor); NP_001254642.1 (isoform 2 precursor), and the mRNA sequences encoding them can be found at Accession Nos. NM_002183.3 (variant 1); NM_001267713.1 (variant 2). In one aspect the antigen-binding portion of the CAR recognizes and binds an antigen within the extracellular domain of the CD123 protein. In one aspect, the CD123 protein is expressed on a cancer cell. As used herein, “CD123” includes proteins comprising mutations, e.g., point mutations, fragments, insertions, deletions and splice variants of full length wild-type CD123.

[0712] The portion of the CAR comprising an antibody or antibody fragment thereof may exist in a variety of forms where the antigen binding domain is expressed as part of a contiguous polypeptide chain including, for example, a single domain antibody fragment (sdAb), a single chain antibody (scFv), a humanized antibody, or bispecific antibody (Harlow et al., 1999, In: Using Antibodies: A Laboratory Manual, Cold Spring Harbor Laboratory Press, NY; Harlow et al., 1989, In: Antibodies: A Laboratory Manual, Cold Spring Harbor, New York; Houston et al., 1988, Proc. Natl. Acad. Sci. USA 85:5879-5883; Bird et al., 1988, Science 242:423-426). In one aspect, the antigen binding domain of a CAR composition of the invention comprises an antibody fragment. In a further aspect, the CAR comprises an antibody fragment that comprises a scFv.

[0713] The term “cognate antigen molecule” refers to any antigen described herein. In one embodiment, it refers to an antigen recognized, e.g., targeted, by a CAR molecule, e.g., any CAR described herein. In another embodiment, it refers to a cancer associated antigen described herein. In one embodiment, the cognate antigen molecule is a recombinant molecule.

[0714] The term “conservative sequence modifications” refers to amino acid modifications that do not significantly affect or alter the binding characteristics of the antibody or antibody fragment containing the amino acid sequence. Such conservative modifications include amino acid substitutions, additions and deletions. Modifications can be introduced into an antibody or antibody fragment of the invention by standard techniques known in the art, such as site-directed mutagenesis and PCR-mediated mutagenesis. Conservative amino acid substitutions are ones in which the amino acid residue is replaced with an amino acid residue having a similar side chain. Families of amino acid residues having similar side chains have been defined in the art. These families include amino acids with basic side chains (e.g., lysine, arginine, histidine), acidic side chains (e.g., aspartic acid, glutamic acid), uncharged polar side chains (e.g., glycine, asparagine, glutamine, serine, threonine, tyrosine, cysteine, tryptophan), nonpolar side chains (e.g., alanine, valine, leucine, isoleucine, proline, phenylalanine, methionine), beta-branched side chains (e.g., threonine, valine, isoleucine) and aromatic side chains (e.g., tyrosine, phenylalanine, tryptophan, histidine). Thus, one or more amino acid residues within a polypeptide of interest (e.g., a CAR) described herein can be replaced with other amino acid residues from the same side chain family and the altered polypeptide of interest (e.g., a CAR) can be tested using the functional assays described herein.

[0715] The term “costimulatory molecule” refers to the cognate binding partner on a T cell that specifically binds with a costimulatory ligand, thereby mediating a costimulatory response by the T cell, such as, but not limited to, proliferation. Costimulatory molecules are cell surface molecules other than antigen receptors or their ligands that are required for an efficient immune response. Costimulatory molecules include, but are not limited to MHC class I molecule, TNF receptor proteins, Immunoglobulin-like proteins, cytokine receptors, integrins, signalling lymphocytic activation molecules (SLAM proteins), activating NK cell receptors, BTLA, a Toll ligand receptor, OX40, CD2, CD7, CD27, CD28, CD30, CD40, CDS, ICAM-1, LFA-1 (CD11a/CD18), 4-1BB (CD137), B7-H3, CDS, ICAM-1, ICOS (CD278), GITR, BAFFR, LIGHT, HVEM (LIGHTR), KIRDS2, SLAMF7, NKp80 (KLRF1), NKp44, NKp30, NKp46, CD19, CD4, CD8alpha, CD8beta, IL2R beta, IL2R gamma, IL7R alpha, ITGA4, VLA1, CD49a, ITGA4, IA4, CD49D, ITGA6, VLA-6, CD49f, ITGAD, CD11d, ITGAE, CD103, ITGAL, CD11a, LFA-1, ITGAM, CD11b, ITGAX, CD11c, ITGB1, CD29, ITGB2, CD18, LFA-1, ITGB7, NKG2D, NKG2C, TNFR2, TRANCE/RANKL, DNAM1 (CD226), SLAMF4 (CD244, 2B4), CD84, CD96 (Tactile), CEACAM1, CRTAM, Ly9 (CD229), CD160 (BY55), PSGL1, CD100 (SEMA4D), CD69, SLAMF6 (NTB-A, Ly108), SLAM (SLAMF1, CD150, IPO-3), BLAME (SLAMF8), SELPLG (CD162), LTBR, LAT, GADS, SLP-76, PAG/Cbp, CD19a, and a ligand that specifically binds with CD83.A costimulatory intracellular signaling domain refers to an intracellular portion of a costimulatory molecule. The intracellular signaling domain can comprise the entire intracellular portion, or the entire native intracellular signaling domain, of the molecule from which it is derived, or a functional fragment thereof. The intracellular signaling domain can comprise the entire intracellular portion, or the entire native intracellular signaling domain, of the molecule from which it is derived, or a functional fragment thereof.

[0716] “Derived from” as that term is used herein, indicates a relationship between a first and a second molecule. It generally refers to structural similarity between the first molecule and a second molecule and does not connotate or include a process or source limitation on a first molecule that is derived from a second molecule. For example, in the case of an intracellular signaling domain that is derived from a CD3zeta molecule, the intracellular signaling domain retains sufficient CD3zeta structure such that is has the required function, namely, the ability to generate a signal under the appropriate conditions. It does not connotate or include a limitation to a particular process of producing the intracellular signaling domain, e.g., it does not mean that, to provide the intracellular signaling domain, one must start with a CD3zeta sequence and delete unwanted sequence, or impose mutations, to arrive at the intracellular signaling domain.

[0717] The phrase “disease associated with expression of a tumor antigen” as described herein includes, but is not limited to, a disease associated with expression of a tumor antigen as described herein or condition associated with cells which express a tumor antigen as described herein including, e.g., proliferative diseases such as a cancer or malignancy or a precancerous condition such as a myelodysplasia, a myelodysplastic syndrome or a preleukemia; or a noncancer related indication associated with cells which express a tumor antigen as described herein. In one embodiment, a cancer associated with expression of a tumor antigen as described herein is a hematological cancer. In one embodiment, a cancer associated with expression of a tumor antigen as described herein is a solid cancer. Further diseases associated with expression of a tumor antigen as described herein include, but not limited to, e.g., atypical and/or non-classical cancers, malignancies, precancerous conditions or proliferative diseases associated with expression of a tumor antigen as described herein. Non-cancer related indications associated with expression of a tumor antigen as described herein include, but are not limited to, e.g., autoimmune disease, (e.g., lupus), inflammatory disorders (allergy and asthma) and transplantation. In some embodiments, the tumor antigen-expressing cells express, or at any time expressed, mRNA encoding the tumor antigen. In an embodiment, the tumor antigen-expressing cells produce the tumor antigen protein (e.g., wild-type or mutant), and the tumor antigen protein may be present at normal levels or reduced levels. In an embodiment, the tumor antigen-expressing cells produced detectable levels of a tumor antigen protein at one point, and subsequently produced substantially no detectable tumor antigen protein.

[0718] The phrase “disease associated with expression of CD19” includes, but is not limited to, a disease associated with a cells that expresses CD19 (e.g., wild-type or mutant CD19) or condition associated with a cell which expresses, or at any time expressed, CD19 (e.g., wild-type or mutant CD19) including, e.g., proliferative diseases such as a cancer or malignancy or a precancerous condition such as a myelodysplasia, a myelodysplastic syndrome or a preleukemia; or a noncancer related indication associated with cells which express CD19. For the avoidance of doubt, a disease associated with expression of CD19 may include a condition associated with a cell which does not presently express CD19, e.g., because CD19 expression has been downregulated, e.g., due to treatment with a molecule targeting CD19, e.g., a CD19 CAR, but which at one time expressed CD19. In one aspect, a cancer associated with expression of CD19 is a hematological cancer. In one aspect, the hematolical cancer is a leukemia or a lymphoma. In one aspect, a cancer associated with expression of CD19 includes cancers and malignancies including, but not limited to, e.g., one or more acute leukemias including but not limited to, e.g., acute myeloid leukemia (AML), B-cell acute Lymphoid Leukemia (BALL), T-cell acute Lymphoid Leukemia (TALL), acute lymphoid leukemia (ALL); one or more chronic leukemias including but not limited to, e.g., chronic myelogenous leukemia (CML), Chronic Lymphoid Leukemia (CLL). Additional cancers or hematologic conditions associated with expression of CD19 comprise, but are not limited to, e.g., B cell prolymphocytic leukemia, blastic plasmacytoid dendritic cell neoplasm, Burkitt's lymphoma, diffuse large B cell lymphoma, Follicular lymphoma, Hairy cell leukemia, small cell- or a large cell-follicular lymphoma, malignant lymphoproliferative conditions, MALT lymphoma, mantle cell lymphoma (MCL), Marginal zone lymphoma, multiple myeloma, myelodysplasia and myelodysplastic syndrome, non-Hodgkin lymphoma, Hodgkin lymphoma, plasmablastic lymphoma, plasmacytoid dendritic cell neoplasm, Waldenstrom macroglobulinemia, myeloproliferative neoplasm; a histiocytic disorder (e.g., a mast cell disorder or a blastic plasmacytoid dendritic cell neoplasm); a mast cell disorder, e.g., systemic mastocytosis or mast cell leukemia; B-cell prolymphocytic leukemia, plasma cell myeloma, and “preleukemia” which are a diverse collection of hematological conditions united by ineffective production (or dysplasia) of myeloid blood cells, and the like.

[0719] Further diseases associated with expression of CD19 expression include, but not limited to, e.g., atypical and/or non-classical cancers, malignancies, precancerous conditions or proliferative diseases associated with expression of CD19. Non-cancer related indications associated with expression of CD19 include, but are not limited to, e.g., autoimmune disease, (e.g., lupus), inflammatory disorders (allergy and asthma) and transplantation. In some embodiments, the CD19-expressing cells express, or at any time expressed, CD19 mRNA. In an embodiment, the CD19-expressing cells produce a CD19 protein (e.g., wild-type or mutant), and the CD19 protein may be present at normal levels or reduced levels. In an embodiment, the CD19-expressing cells produced detectable levels of a CD19 protein at one point, and subsequently produced substantially no detectable CD19 protein.

[0720] In some embodiments, the tumor antigen-expressing cells express, or at any time expressed, mRNA encoding the tumor antigen. In an embodiment, the tumor antigen-expressing cells produce the tumor antigen protein (e.g., wild-type or mutant), and the tumor antigen protein may be present at normal levels or reduced levels. In an embodiment, the tumor antigen-expressing cells produced detectable levels of a tumor antigen protein at one point, and subsequently produced substantially no detectable tumor antigen protein. In other embodiments, the disease is a CD19-negative cancer, e.g., a CD19-negative relapsed cancer. In some embodiments, the tumor antigen (e.g., CD19)-expressing cell expresses, or at any time expressed, mRNA encoding the tumor antigen. In an embodiment, the tumor antigen (e.g., CD19)-expressing cell produces the tumor antigen protein (e.g., wild-type or mutant), and the tumor antigen protein may be present at normal levels or reduced levels. In an embodiment, the tumor antigen (e.g., CD19)-expressing cell produced detectable levels of a tumor antigen protein at one point, and subsequently produced substantially no detectable tumor antigen protein.

[0721] The term “effector function” refers to a specialized function of a cell. Effector function of a T cell, for example, may be cytolytic activity or helper activity including the secretion of cytokines. The term “encoding” refers to the inherent property of specific sequences of nucleotides in a polynucleotide, such as a gene, a cDNA, or an mRNA, to serve as templates for synthesis of other polymers and macromolecules in biological processes having either a defined sequence of nucleotides (e.g., rRNA, tRNA and mRNA) or a defined sequence of amino acids and the biological properties resulting therefrom. Thus, a gene, cDNA, or RNA, encodes a protein if transcription and translation of mRNA corresponding to that gene produces the protein in a cell or other biological system. Both the coding strand, the nucleotide sequence of which is identical to the mRNA sequence and is usually provided in sequence listings, and the non-coding strand, used as the template for transcription of a gene or cDNA, can be referred to as encoding the protein or other product of that gene or cDNA.

[0722] The term “endogenous” refers to any material from or produced inside an organism, cell, tissue or system.

[0723] The term “exogenous” refers to any material introduced from or produced outside an organism, cell, tissue or system.

[0724] The term “expression” refers to the transcription and/or translation of a particular nucleotide sequence driven by a promoter The term “4-1BB” refers to a member of the TNFR superfamily with an amino acid sequence provided as GenBank Acc. No. AAA62478.2, or the equivalent residues from a non-human species, e.g., mouse, rodent, monkey, ape and the like; and a “4-1BB costimulatory domain” is defined as amino acid residues 214-255 of GenBank Acc. No. AAA62478.2, or the equivalent residues from a non-human species, e.g., mouse, rodent, monkey, ape and the like. In one aspect, the “4-1BB costimulatory domain” is the sequence provided as SEQ ID NO:158 or the equivalent residues from a non-human species, e.g., mouse, rodent, monkey, ape and the like.

[0725] The term “expression vector” refers to a vector comprising a recombinant polynucleotide comprising expression control sequences operatively linked to a nucleotide sequence to be expressed. An expression vector comprises sufficient cis-acting elements for expression; other elements for expression can be supplied by the host cell or in an in vitro expression system. Expression vectors include all those known in the art, including cosmids, plasmids (e.g., naked or contained in liposomes) and viruses (e.g., lentiviruses, retroviruses, adenoviruses, and adeno-associated viruses) that incorporate the recombinant polynucleotide.

[0726] The term “homologous” or “identity” refers to the subunit sequence identity between two polymeric molecules, e.g., between two nucleic acid molecules, such as, two DNA molecules or two RNA molecules, or between two polypeptide molecules. When a subunit position in both of the two molecules is occupied by the same monomeric subunit; e.g., if a position in each of two DNA molecules is occupied by adenine, then they are homologous or identical at that position. The homology between two sequences is a direct function of the number of matching or homologous positions; e.g., if half (e.g., five positions in a polymer ten subunits in length) of the positions in two sequences are homologous, the two sequences are 50% homologous; if 90% of the positions (e.g., 9 of 10), are matched or homologous, the two sequences are 90% homologous.

[0727] The compositions and methods of the present invention encompass polypeptides and nucleic acids having the sequences specified, or sequences substantially identical or similar thereto, e.g., sequences at least 85%, 90%, 95% identical or higher to the sequence specified. In the context of an amino acid sequence, the term “substantially identical” is used herein to refer to a first amino acid that contains a sufficient or minimum number of amino acid residues that are i) identical to, or ii) conservative substitutions of aligned amino acid residues in a second amino acid sequence such that the first and second amino acid sequences can have a common structural domain and/or common functional activity. For example, amino acid sequences that contain a common structural domain having at least about 85%, 90%, 91%, 92%, 93%, 94%, 95%, 96%, 97%, 98% or 99% identity to a reference sequence, e.g., a sequence provided herein.

[0728] In the context of nucleotide sequence, the term “substantially identical” is used herein to refer to a first nucleic acid sequence that contains a sufficient or minimum number of nucleotides that are identical to aligned nucleotides in a second nucleic acid sequence such that the first and second nucleotide sequences encode a polypeptide having common functional activity, or encode a common structural polypeptide domain or a common functional polypeptide activity. For example, nucleotide sequences having at least about 85%, 90%, 91%, 92%, 93%, 94%, 95%, 96%, 97%, 98% or 99% identity to a reference sequence, e.g., a sequence provided herein.

[0729] The term “variant” refers to a polypeptide that has a substantially identical amino acid sequence to the naturally-occurring sequence, or are encoded by a substantially identical nucleotide sequence. In some embodiments, the variant is a functional variant.

[0730] The term “functional variant” refers to a polypeptide that has a substantially identical amino acid sequence to the naturally-occurring sequence, or are encoded by a substantially identical nucleotide sequence, and are capable of having one or more activities of the naturally-occurring sequence.

[0731] The term “COF1/CRBN-binding variant” of sequence X refers to a polypeptide that: (1) has a substantially identical amino acid sequence to sequence X, and (2) binds to COF1, binds to a complex of COF1 and CRBN, or binds to CRBN in the presence of COF1.

[0732] The term “COF2/CRBN-binding variant” of sequence X refers to a polypeptide that: (1) has a substantially identical amino acid sequence to sequence X, and (2) binds to COF2, binds to a complex of COF2 and CRBN, or binds to CRBN in the presence of COF2.

[0733] The term “COF3/CRBN-binding variant” of sequence X refers to a polypeptide that: (1) has a substantially identical amino acid sequence to sequence X, and (2) binds to COF3, binds to a complex of COF3 and CRBN, or binds to CRBN in the presence of COF3.

[0734] “Immune effector cell,” as that term is used herein, refers to a cell that is involved in an immune response, e.g., in the promotion of an immune effector response. Examples of immune effector cells include T cells, e.g., alpha/beta T cells and gamma/delta T cells, B cells, natural killer (NK) cells, natural killer T (NKT) cells, mast cells, and myeloic-derived phagocytes.

[0735] “Immune effector function or immune effector response,” as that term is used herein, refers to function or response, e.g., of an immune effector cell, that enhances or promotes an immune attack of a target cell. E.g., an immune effector function or response refers a property of a T or NK cell that promotes killing or the inhibition of growth or proliferation, of a target cell. In the case of a T cell, primary stimulation and co-stimulation are examples of immune effector function or response. The term “inhibition” or “inhibitor” includes a reduction in a certain parameter, e.g., an activity, of a given molecule, e.g., CD19, CD20, CD10, CD22, CD34, CD123, FLT-3, ROR1, CD79b, CD179b, mesothelin, or CD79a. For example, inhibition of an activity, e.g., an activity of CD20, CD10, CD19, CD22, CD34, CD123, FLT-3, ROR1, CD79b, CD179b, mesothelin, or CD79a, of at least 5%, 10%, 20%, 30%, 40%, or more is included by this term. Thus, inhibition need not be 100%. Activities for the inhibitors can be determined as described herein or by assays known in the art.

[0736] An “intracellular signaling domain,” as the term is used herein, refers to an intracellular portion of a molecule. The intracellular signaling domain can generate a signal that promotes an immune effector function of the CAR containing cell, e.g., a CART cell. Examples of immune effector function, e.g., in a CART cell, include cytolytic activity and helper activity, including the secretion of cytokines. In embodiments, the intracellular signaling domain is the portion of a protein which transduces the effector function signal and directs the cell to perform a specialized function. While the entire intracellular signaling domain can be employed, in many cases it is not necessary to use the entire chain. To the extent that a truncated portion of the intracellular signaling domain is used, such truncated portion may be used in place of the intact chain as long as it transduces the effector function signal. The term intracellular signaling domain is thus meant to include any truncated portion of the intracellular signaling domain sufficient to transduce the effector function signal.

[0737] In an embodiment, the intracellular signaling domain can comprise a primary intracellular signaling domain. Exemplary primary intracellular signaling domains include those derived from the molecules responsible for primary stimulation, or antigen dependent simulation. In an embodiment, the intracellular signaling domain can comprise a costimulatory intracellular domain. Exemplary costimulatory intracellular signaling domains include those derived from molecules responsible for costimulatory signals, or antigen independent stimulation. For example, in the case of a CART, a primary intracellular signaling domain can comprise a cytoplasmic sequence of a T cell receptor, and a costimulatory intracellular signaling domain can comprise cytoplasmic sequence from co-receptor or costimulatory molecule.

[0738] A primary intracellular signaling domain can comprise a signaling motif which is known as an immunoreceptor tyrosine-based activation motif or ITAM. Examples of ITAM containing primary cytoplasmic signaling sequences include, but are not limited to, those derived from CD3 zeta, FcR gamma, FcR beta, CD3 gamma, CD3 delta, CD3 epsilon, CD5, CD22, CD79a, CD79b, CD278 (“ICOS”), FcεRI, CD66d, CD32, DAP10 and DAP12.

[0739] The term “isolated” means altered or removed from the natural state. For example, a nucleic acid or a peptide naturally present in a living animal is not “isolated,” but the same nucleic acid or peptide partially or completely separated from the coexisting materials of its natural state is “isolated.” An isolated nucleic acid or protein can exist in substantially purified form, or can exist in a non-native environment such as, for example, a host cell.

[0740] As used herein, the term “mesothelin” refers to the 40-kDa protein, mesothelin, which is anchored at the cell membrane by a glycosylphosphatidyl inositol (GPI) linkage and an amino-terminal 31-kDa shed fragment, called megkaryocyte potentiating factor (MPF). Both fragments contain N-glycosylation sites. The term also refers to a soluble splice variant of the 40-kDa carboxyl-terminal fragment also called “soluble mesothelin/MPF-related”. Preferably, the term refers to a human mesothelin of GenBank accession number AAH03512.1, and naturally cleaved portions thereof, e.g., as expressed on a cell membrane, e.g., a cancer cell membrane. As used herein, “mesothelin” includes proteins comprising mutations, e.g., point mutations, fragments, insertions, deletions and splice variants of full length wild-type mesothelin.

[0741] Unless otherwise specified, a “nucleotide sequence encoding an amino acid sequence” includes all nucleotide sequences that are degenerate versions of each other and that encode the same amino acid sequence. The phrase nucleotide sequence that encodes a protein or a RNA may also include introns to the extent that the nucleotide sequence encoding the protein may in some version contain an intron(s)

[0742] In the context of the present invention, the following abbreviations for the commonly occurring nucleic acid bases are used. “A” refers to adenosine, “C” refers to cytosine, “G” refers to guanosine, “T” refers to thymidine, and “U” refers to uridine.

[0743] The term “nucleic acid” or “polynucleotide” refers to deoxyribonucleic acids (DNA) or ribonucleic acid (RNA), or a combination of a DNA or RNA thereof, and polymers thereof in either single- or double-stranded form. The term “nucleic acid” includes a gene, cDNA or an mRNA. In one embodiment, the nucleic acid molecule is synthetic (e.g., chemically synthesized) or recombinant. Unless specifically limited, the term encompasses nucleic acids containing analogues or derivatives of natural nucleotides that have similar binding properties as the reference nucleic acid and are metabolized in a manner similar to naturally occurring nucleotides. Unless otherwise indicated, a particular nucleic acid sequence also implicitly encompasses conservatively modified variants thereof (e.g., degenerate codon substitutions), alleles, orthologs, SNPs, and complementary sequences as well as the sequence explicitly indicated. Specifically, degenerate codon substitutions may be achieved by generating sequences in which the third position of one or more selected (or all) codons is substituted with mixed-base and/or deoxyinosine residues (Batzer et al., Nucleic Acid Res. 19:5081 (1991); Ohtsuka et al., J. Biol. Chem. 260:2605-2608 (1985); and Rossolini et al., Mol. Cell. Probes 8:91-98 (1994)).

[0744] The terms “peptide,” “polypeptide,” and “protein” are used interchangeably, and refer to a compound comprised of amino acid residues covalently linked by peptide bonds. A protein or peptide must contain at least two amino acids, and no limitation is placed on the maximum number of amino acids that can comprise a protein's or peptide's sequence. Polypeptides include any peptide or protein comprising two or more amino acids joined to each other by peptide bonds. As used herein, the term refers to both short chains, which also commonly are referred to in the art as peptides, oligopeptides and oligomers, for example, and to longer chains, which generally are referred to in the art as proteins, of which there are many types. “Polypeptides” include, for example, biologically active fragments, substantially homologous polypeptides, oligopeptides, homodimers, heterodimers, variants of polypeptides, modified polypeptides, derivatives, analogs, fusion proteins, among others. A polypeptide includes a natural peptide, a recombinant peptide, or a combination thereof.

[0745] The term “operably linked” or “transcriptional control” refers to functional linkage between a regulatory sequence and a heterologous nucleic acid sequence resulting in expression of the latter. For example, a first nucleic acid sequence is operably linked with a second nucleic acid sequence when the first nucleic acid sequence is placed in a functional relationship with the second nucleic acid sequence. For instance, a promoter is operably linked to a coding sequence if the promoter affects the transcription or expression of the coding sequence. Operably linked DNA sequences can be contiguous with each other and, e.g., where necessary to join two protein coding regions, are in the same reading frame.

[0746] The term “parenteral” administration of an immunogenic composition includes, e.g., subcutaneous (s.c.), intravenous (i.v.), intramuscular (i.m.), or intrasternal injection, intratumoral, or infusion techniques.

[0747] The term “promoter” refers to a DNA sequence recognized by the synthetic machinery of the cell, or introduced synthetic machinery, required to initiate the specific transcription of a polynucleotide sequence.

[0748] The term “promoter/regulatory sequence” refers to a nucleic acid sequence which is required for expression of a gene product operably linked to the promoter/regulatory sequence. In some instances, this sequence may be the core promoter sequence and in other instances, this sequence may also include an enhancer sequence and other regulatory elements which are required for expression of the gene product. The promoter/regulatory sequence may, for example, be one which expresses the gene product in a tissue specific manner.

[0749] The term “signaling domain” refers to the functional portion of a protein which acts by transmitting information within the cell to regulate cellular activity via defined signaling pathways by generating second messengers or functioning as effectors by responding to such messengers.

[0750] The term “scFv” refers to a fusion protein comprising at least one antibody fragment comprising a variable region of a light chain and at least one antibody fragment comprising a variable region of a heavy chain, wherein the light and heavy chain variable regions are contiguously linked, e.g., via a synthetic linker, e.g., a short flexible polypeptide linker, and capable of being expressed as a single chain polypeptide, and wherein the scFv retains the specificity of the intact antibody from which it is derived. Unless specified, as used herein an scFv may have the VL and VH variable regions in either order, e.g., with respect to the N-terminal and C-terminal ends of the fusion polypeptide, the scFv may comprise VL-linker-VH or may comprise VH-linker-VL.

[0751] The portion of a CAR comprising an antibody or antibody fragment thereof may exist in a variety of forms where the antigen binding domain is expressed as part of a contiguous polypeptide chain including, for example, a single domain antibody fragment (sdAb), a single chain antibody (scFv) and a humanized antibody (Harlow et al., 1999, In: Using Antibodies: A Laboratory Manual, Cold Spring Harbor Laboratory Press, NY; Harlow et al., 1989, In: Antibodies: A Laboratory Manual, Cold Spring Harbor, New York; Houston et al., 1988, Proc. Natl. Acad. Sci. USA 85:5879-5883; Bird et al., 1988, Science 242:423-426). In one embodiment, the antigen binding domain of a CAR comprises an antibody fragment. In a further embodiment, the CAR comprises an antibody fragment that comprises a scFv. As used herein, the term “binding domain” or “antibody molecule” refers to a protein, e.g., an immunoglobulin chain or fragment thereof, comprising at least one immunoglobulin variable domain sequence. The term “binding domain” or “antibody molecule” encompasses antibodies and antibody fragments. In an embodiment, an antibody molecule is a multispecific antibody molecule, e.g., it comprises a plurality of immunoglobulin variable domain sequences, wherein a first immunoglobulin variable domain sequence of the plurality has binding specificity for a first epitope and a second immunoglobulin variable domain sequence of the plurality has binding specificity for a second epitope. In an embodiment, a multispecific antibody molecule is a bispecific antibody molecule. A bispecific antibody has specificity for no more than two antigens. A bispecific antibody molecule is characterized by a first immunoglobulin variable domain sequence which has binding specificity for a first epitope and a second immunoglobulin variable domain sequence that has binding specificity for a second epitope.

[0752] The term “stimulation,” refers to a primary response induced by binding of a stimulatory molecule (e.g., a TCR/CD3 complex or CAR) with its cognate ligand (e.g., antigen molecule), thereby mediating a signal transduction event, such as, but not limited to, signal transduction via the TCR/CD3 complex or signal transduction via the appropriate NK receptor or signaling domains of the CAR. Stimulation can mediate altered expression of certain molecules.

[0753] The term “stimulatory molecule,” refers to a molecule expressed by an immune cell (e.g., T cell, NK cell, B cell) that provides the cytoplasmic signaling sequence(s) that regulate activation of the immune cell in a stimulatory way for at least some aspect of the immune cell signaling pathway. In one aspect, the signal is a primary signal that is initiated by, for instance, binding of a TCR/CD3 complex with an MHC molecule loaded with peptide, and which leads to mediation of a T cell response, including, but not limited to, proliferation, activation, differentiation, and the like. A primary cytoplasmic signaling sequence (also referred to as a “primary signaling domain”) that acts in a stimulatory manner may contain a signaling motif which is known as immunoreceptor tyrosine-based activation motif or ITAM. Examples of an ITAM containing cytoplasmic signaling sequence that is of particular use in the invention includes, but is not limited to, those derived from CD3 zeta, common FcR gamma (FCER1G), Fc gamma RIIa, FcR beta (Fc Epsilon R1b), CD3 gamma, CD3 delta, CD3 epsilon, CD79a, CD79b, DAP10, and DAP12. In a specific CAR of the invention, the intracellular signaling domain in any one or more CARS of the invention comprises an intracellular signaling sequence, e.g., a primary signaling sequence of CD3-zeta. In a specific CAR of the invention, the primary signaling sequence of CD3-zeta is the sequence provided as SEQ ID NO: 163, or the equivalent residues from a non-human species, e.g., mouse, rodent, monkey, ape and the like. In a specific CAR of the invention, the primary signaling sequence of CD3-zeta is the sequence as provided in SEQ ID NO: 166, or the equivalent residues from a non-human species, e.g., mouse, rodent, monkey, ape and the like.

[0754] The term “transfer vector” refers to a composition of matter which comprises an isolated nucleic acid and which can be used to deliver the isolated nucleic acid to the interior of a cell. Numerous vectors are known in the art including, but not limited to, linear polynucleotides, polynucleotides associated with ionic or amphiphilic compounds, plasmids, and viruses. Thus, the term “transfer vector” includes an autonomously replicating plasmid or a virus. The term should also be construed to further include non-plasmid and non-viral compounds which facilitate transfer of nucleic acid into cells, such as, for example, a polylysine compound, liposome, and the like. Examples of viral transfer vectors include, but are not limited to, adenoviral vectors, adeno-associated virus vectors, retroviral vectors, lentiviral vectors, and the like.

[0755] The term “zeta” or alternatively “zeta chain”, “CD3-zeta” or “TCR-zeta” is defined as the protein provided as GenBank Acc. No. BAG36664.1, or the equivalent residues from a non-human species, e.g., mouse, rodent, monkey, ape and the like, and a “zeta stimulatory domain” or alternatively a “CD3-zeta stimulatory domain” or a “TCR-zeta stimulatory domain” is defined as the amino acid residues from the cytoplasmic domain of the zeta chain that are sufficient to functionally transmit an initial signal necessary for T cell activation. In one aspect the cytoplasmic domain of zeta comprises residues 52 through 164 of GenBank Acc. No. BAG36664.1 or the equivalent residues from a non-human species, e.g., mouse, rodent, monkey, ape and the like, that are functional orthologs thereof. In one aspect, the “zeta stimulatory domain” or a “CD3-zeta stimulatory domain” is the sequence provided as SEQ ID NO: 163 (mutant CD3 zeta). In one aspect, the “zeta stimulatory domain” or a “CD3-zeta stimulatory domain” is the sequence provided as SEQ ID NO: 166 (wild-type human CD3 zeta).

[0756] The term “constitutive” promoter refers to a nucleotide sequence which, when operably linked with a polynucleotide which encodes or specifies a gene product, causes the gene product to be produced in a cell under most or all physiological conditions of the cell.

[0757] The term “inducible” promoter refers to a nucleotide sequence which, when operably linked with a polynucleotide which encodes or specifies a gene product, causes the gene product to be produced in a cell substantially only when an inducer which corresponds to the promoter is present in the cell.

[0758] The term “tissue-specific” promoter refers to a nucleotide sequence which, when operably linked with a polynucleotide encodes or specified by a gene, causes the gene product to be produced in a cell substantially only if the cell is a cell of the tissue type corresponding to the promoter.

[0759] The terms “cancer associated antigen,” “tumor antigen,” “hyperproliferative disorder antigen,” and “antigen associated with a hyperproliferative disorder” interchangeably refer to antigens that are common to specific hyperproliferative disorders. In some embodiments, these terms refer to a molecule (typically a protein, carbohydrate or lipid) that is expressed on the surface of a cancer cell, either entirely or as a fragment (e.g., MHC/peptide), and which is useful for the preferential targeting of a pharmacological agent to the cancer cell. In some embodiments, a tumor antigen is a marker expressed by both normal cells and cancer cells, e.g., a lineage marker, e.g., CD19 on B cells. In some embodiments, a tumor antigen is a cell surface molecule that is overexpressed in a cancer cell in comparison to a normal cell, for instance, 1-fold over expression, 2-fold overexpression, 3-fold overexpression or more in comparison to a normal cell. In some embodiments, a tumor antigen is a cell surface molecule that is inappropriately synthesized in the cancer cell, for instance, a molecule that contains deletions, additions or mutations in comparison to the molecule expressed on a normal cell. In some embodiments, a tumor antigen will be expressed exclusively on the cell surface of a cancer cell, entirely or as a fragment (e.g., MHC/peptide), and not synthesized or expressed on the surface of a normal cell. In certain aspects, the hyperproliferative disorder antigens of the present invention are derived from, cancers including but not limited to primary or metastatic melanoma, thymoma, lymphoma, sarcoma, lung cancer, liver cancer, non-Hodgkin lymphoma, Hodgkin lymphoma, leukemias, uterine cancer, cervical cancer, bladder cancer, kidney cancer and adenocarcinomas such as breast cancer, prostate cancer (e.g., castrate-resistant or therapy-resistant prostate cancer, or metastatic prostate cancer), ovarian cancer, pancreatic cancer, and the like, or a plasma cell proliferative disorder, e.g., asymptomatic myeloma (smoldering multiple myeloma or indolent myeloma), monoclonal gammapathy of undetermined significance (MGUS), Waldenstrom's macroglobulinemia, plasmacytomas (e.g., plasma cell dyscrasia, solitary myeloma, solitary plasmacytoma, extramedullary plasmacytoma, and multiple plasmacytoma), systemic amyloid light chain amyloidosis, and POEMS syndrome (also known as Crow-Fukase syndrome, Takatsuki disease, and PEP syndrome). In some embodiments, the CARs of the present invention include CARs comprising an antigen binding domain (e.g., antibody or antibody fragment) that binds to an MHC presented peptide. Normally, peptides derived from endogenous proteins fill the pockets of Major histocompatibility complex (MHC) class I molecules, and are recognized by T cell receptors (TCRs) on CD8+T lymphocytes. The MHC class I complexes are constitutively expressed by all nucleated cells. In cancer, virus-specific and/or tumor-specific peptide/MHC complexes represent a unique class of cell surface targets for immunotherapy. TCR-like antibodies targeting peptides derived from viral or tumor antigens in the context of human leukocyte antigen (HLA)-A1 or HLA-A2 have been described (see, e.g., Sastry et al., J Virol. 2011 85(5):1935-1942; Sergeeva et al., Blood, 2011 117(16):4262-4272; Verma et al., J Immunol 2010 184(4):2156-2165; Willemsen et al., Gene Ther 2001 8(21):1601-1608; Dao et al., Sci Transl Med 2013 5(176):176ra33; Tassev et al., Cancer Gene Ther 2012 19(2):84-100). For example, TCR-like antibody can be identified from screening a library, such as a human scFv phage displayed library.

[0760] The term “flexible polypeptide linker” or “linker” as used refers to a peptide linker that comprises, or consists of, amino acids such as glycine and/or serine residues used alone or in combination, to link two polypeptides together, e.g., a COF1/CRBN-, COF2/CRBN-, or COF3/CRBN-binding polypeptide and a heterologous polypeptide, or a variable heavy and variable light chain regions. In one embodiment, the flexible polypeptide linker is a Gly/Ser linker and comprises the amino acid sequence (Gly-Gly-Gly-Ser)n (SEQ ID NO: 173), where n is a positive integer equal to or greater than 1. For example, n=1, n=2, n=3, n=4, n=5, n=6, n=7, n=8, n=9 and n=10. In one embodiment, the flexible polypeptide linkers include, but are not limited to, (Gly4 Ser)4 (SEQ ID NO: 141) or (Gly4 Ser)3 (SEQ ID NO: 142). In another embodiment, the linkers include multiple repeats of (Gly2Ser), (GlySer) or (Gly3Ser) (SEQ ID NO: 143). Also included within the scope of the invention are linkers described in WO2012/138475, incorporated herein by reference).

[0761] As used herein, “transient” refers to expression of a non-integrated transgene for a period of hours, days or weeks, wherein the period of time of expression is less than the period of time for expression of the gene if integrated into the genome or contained within a stable plasmid replicon in the cell. In embodiments, a CAR molecule is transiently expressed in a cell, e.g., host cell, for a finite period of time or number of cell replications, e.g., less than 50 days (e.g., less than 40, 30, 25, 20, 15, 10, 5, 4, 3, 2 or fewer days). In one embodiment, transient expression is effected using an in vitro transcribed RNA.

[0762] As used herein, “stable” refers to expression of a transgene that is for a longer period than transient expression. In embodiments, the transgene is integrated into the genome of a cell, e.g., a host cell, or contained within a stable plasmid replicon in the cell. In one embodiment, a transgene is integrated into the cell genome using a gene delivery vector, e.g., a retroviral vector such as a lentivirus vector.

[0763] As used herein, the terms “treat”, “treatment” and “treating” refer to the reduction or amelioration of the progression, severity and/or duration of a proliferative disorder, or the amelioration of one or more symptoms (e.g., one or more discernible symptoms) of a proliferative disorder resulting from the administration of one or more therapies (e.g., one or more therapeutic agents, such as a CAR of the invention). In specific embodiments, the terms “treat”, “treatment” and “treating” refer to the amelioration of at least one measurable physical parameter of a proliferative disorder, such as growth of a tumor, not necessarily discernible by the patient. In other embodiments the terms “treat”, “treatment” and “treating”-refer to the inhibition of the progression of a proliferative disorder, either physically by, e.g., stabilization of a discernible symptom, physiologically by, e.g., stabilization of a physical parameter, or both. In other embodiments the terms “treat”, “treatment” and “treating” refer to the reduction or stabilization of tumor size or cancerous cell count. Treatment need not be 100%, and in some embodiments a reduction or delay in at least one symptom of the disease or disorder by at least 50%, 60%, 70%, 80%, 90%, 95%, or 99% is sufficient to be considered within these terms.

[0764] The term “subject” is intended to include living organisms in which an immune response can be elicited (e.g., mammals, e.g., humans). Examples of subjects include humans, monkeys, chimpanzees, dogs, cats, mice, rats, and transgenic species thereof. T cells can be obtained from a number of sources, including peripheral blood mononuclear cells, bone marrow, lymph node tissue, cord blood, thymus tissue, tissue from a site of infection, ascites, pleural effusion, spleen tissue, and tumors.

[0765] The term “transfected” or “transformed” or “transduced” refers to a process by which exogenous nucleic acid is transferred or introduced into the host cell. A “transfected” or “transformed” or “transduced” cell is one which has been transfected, transformed or transduced with exogenous nucleic acid. The cell includes the primary subject cell and its progeny.

[0766] The term “specifically binds,” refers to an antibody, or a ligand, which recognizes and binds with a cognate binding partner protein present in a sample, but which antibody or ligand does not substantially recognize or bind other molecules in the sample.

[0767] Ranges: throughout this disclosure, various aspects of the invention can be presented in a range format. It should be understood that the description in range format is merely for convenience and brevity and should not be construed as an inflexible limitation on the scope of the invention. Accordingly, the description of a range should be considered to have specifically disclosed all the possible subranges as well as individual numerical values within that range. For example, description of a range such as from 1 to 6 should be considered to have specifically disclosed subranges such as from 1 to 3, from 1 to 4, from 1 to 5, from 2 to 4, from 2 to 6, from 3 to 6 etc., as well as individual numbers within that range, for example, 1, 2, 2.7, 3, 4, 5, 5.3, and 6. As another example, a range such as 95-99% identity, includes something with 95%, 96%, 97%, 98% or 99% identity, and includes subranges such as 96-99%, 96-98%, 96-97%, 97-99%, 97-98% and 98-99% identity. This applies regardless of the breadth of the range.

[0768] Definitions of specific functional groups and chemical terms are described in more detail below. The chemical elements are identified in accordance with the Periodic Table of the Elements, CAS version, Handbook of Chemistry and Physics, 75^{th} Ed., inside cover, and specific functional groups are generally defined as described therein. Additionally, general principles of organic chemistry, as well as specific functional moieties and reactivity, are described in Thomas Sorrell, Organic Chemistry, University Science Books, Sausalito, 1999; Smith and March, March's Advanced Organic Chemistry, 5^{th} Edition, John Wiley & Sons, Inc., New York, 2001; Larock, Comprehensive Organic Transformations, VCH Publishers, Inc., New York, 1989; and Carruthers, Some Modern Methods of Organic Synthesis, 3^{rd} Edition, Cambridge University Press, Cambridge, 1987.

[0769] The term “alkyl,” as used herein, refers to a monovalent saturated, straight- or branched-chain hydrocarbon such as a straight or branched group of 1-12, 1-10, or 1-6 carbon atoms, referred to herein as C₁-C₁₂ alkyl, C₁-C₁₀ alkyl, and C₁-C₆ alkyl, respectively. Examples of alkyl groups include, but are not limited to, methyl, ethyl, n-propyl, isopropyl, n-butyl, iso-butyl, sec-butyl, sec-pentyl, iso-pentyl, tert-butyl, n-pentyl, neopentyl, n-hexyl, sec-hexyl, and the like.

[0770] The terms “alkenyl” and “alkynyl” as used herein refer to unsaturated aliphatic groups analogous in length and possible substitution to the alkyls described above, but that contain at least one double or triple bond, respectively. Exemplary alkenyl groups include, but are not limited to, —CH═CH₂ and —CH₂CH═CH₂.

[0771] The term “alkoxy” as used herein refers to a straight or branched chain saturated hydrocarbon containing 1-12 carbon atoms containing a terminal “O” in the chain, e.g., —O(alkyl). Examples of alkoxy groups include, without limitation, methoxy, ethoxy, propoxy, butoxy, t-butoxy, or pentoxy groups.

[0772] The term “aryl” as used herein refers to a monocyclic, bicyclic or polycyclic hydrocarbon ring system, wherein at least one ring is aromatic. Representative aryl groups include fully aromatic ring systems, such as phenyl (e.g., (C₆) aryl), naphthyl (e.g., (C₁₀) aryl), and anthracenyl (e.g., (C₁₄) aryl), and ring systems where an aromatic carbon ring is fused to one or more non-aromatic carbon rings, such as indanyl, phthalimidyl, naphthimidyl, or tetrahydronaphthyl, and the like.

[0773] The term “carbocyclyl” as used herein refers to monocyclic, or fused, spiro-fused, and/or bridged bicyclic or polycyclic hydrocarbon ring system containing 3-18 carbon atoms, wherein each ring is either completely saturated or contains one or more units of unsaturation, but where no ring is aromatic. Representative carbocyclyl groups include cycloalkyl groups (e.g., cyclopentyl, cyclobutyl, cyclopentyl, cyclohexyl and the like), and cycloalkenyl groups (e.g., cyclopentenyl, cyclohexenyl, cyclopentadienyl, and the like).

[0774] The term “carbonyl” as used herein refers to —C═O.

[0775] The term “cyano” as used herein refers to —CN.

[0776] The terms “halo” or “halogen” as used herein refer to fluorine (fluoro, —F), chlorine (chloro, —Cl), bromine (bromo, —Br), or iodine (iodo, —I).

[0777] The term “haloalkyl” as used herein refers to a monovalent saturated straight or branched alkyl chain wherein at least one carbon atom in the chain is substituted with one or more halogen atoms. In some embodiments, a haloalkyl group may comprise, e.g., 1-12, 1-10, or 1-6 carbon atoms, referred to herein as C₁-C₁₂haloalkyl, C₁-C₁₀ haloalkyl, and C₁-C₆ haloalkyl. Examples of haloalkyl groups include, but are not limited to, trifluoromethyl, difluoromethyl, pentafluoroethyl, trichloromethyl, etc.

[0778] The term “haloalkoxy” to a straight or branched chain saturated hydrocarbon containing 1-12 carbon atoms containing a terminal “O” in the chain, wherein at least one carbon atom in the chain is substituted with one or more halogens. Examples of haloalkoxy groups include, but are not limited to, trifluoromethoxy, difluoromethoxy, pentafluoroethoxy, trichloromethoxy, etc.

[0779] The term “heteroalkyl” as used herein refers to a monovalent saturated straight or branched alkyl chain wherein at least one carbon atom in the chain is replaced with a heteroatom, such as O, S, or N, provided that upon substitution, the chain comprises at least one carbon atom. In some embodiments, a heteroalkyl group may comprise, e.g., 1-12, 1-10, or 1-6 carbon atoms, referred to herein as C₁-C₁₂ heteroalkyl, C₁-C₁₀heteroalkyl, and C₁-C₆heteroalkyl. In certain instances, a heteroalkyl group comprises 1, 2, 3, or 4 independently selected heteroatoms in place of 1, 2, 3, or 4 individual carbon atoms in the alkyl chain. Representative heteroalkyl groups include —CH₂NHC(O)CH₃, —CH₂CH₂OCH₃, —CH₂CH₂NHCH₃, —CH₂CH₂N(CH₃)CH₃, and the like.

[0780] The terms “alkylene,” “alkenylene”, “alkynylene,” and “heteroalkylene” as used herein refer to a divalent radical of an alkyl, alkenyl, alkynyl, or heteroalkyl group, respectively. Any of a monovalent alkyl, alkenyl, alkynyl, or heteroalkyl group may be an alkylene, alkenylene, alkynylene, or heteroalkylene by abstraction of a second hydrogen atom from the alkyl, alkenyl, alkynyl, or heteroalkyl group.

[0781] The term “heteroaryl” as used herein refers to a monocyclic, bicyclic or polycyclic ring system wherein at least one ring is both aromatic and comprises a heteroatom; and wherein no other rings are heterocyclyl (as defined below). Representative heteroaryl groups include ring systems where (i) each ring comprises a heteroatom and is aromatic, e.g., imidazolyl, oxazolyl, thiazolyl, triazolyl, pyrrolyl, furanyl, thiophenyl pyrazolyl, pyridinyl, pyrazinyl, pyridazinyl, pyrimidinyl, indolizinyl, purinyl, naphthyridinyl, and pteridinyl; (ii) each ring is aromatic or carbocyclyl, at least one aromatic ring comprises a heteroatom and at least one other ring is a hydrocarbon ring or e.g., indolyl, isoindolyl, benzothienyl, benzofuranyl, dibenzofuranyl, indazolyl, benzimidazolyl, benzthiazolyl, quinolyl, isoquinolyl, cinnolinyl, phthalazinyl, quinazolinyl, quinoxalinyl, carbazolyl, acridinyl, phenazinyl, phenothiazinyl, phenoxazinyl, pyrido[2,3-b]-1,4-oxazin-3(4H)-one, thiazolo-[4,5-c]-pyridinyl, 4,5,6,7-tetrahydrothieno[2,3-c]pyridinyl, 5,6-dihydro-4H-thieno[2,3-c]pyrrolyl, 4,5,6,7,8-tetrahydroquinolinyl and 5,6,7,8-tetrahydroisoquinolinyl; and (iii) each ring is aromatic or carbocyclyl, and at least one aromatic ring shares a bridgehead heteroatom with another aromatic ring, e.g., 4H-quinolizinyl. In certain embodiments, the heteroaryl is a monocyclic or bicyclic ring, wherein each of said rings contains 5 or 6 ring atoms where 1, 2, 3, or 4 of said ring atoms are a heteroatom independently selected from N, O, and S.

[0782] The term “heterocyclyl” as used herein refers to a monocyclic, or fused, spiro-fused, and/or bridged bicyclic and polycyclic ring systems where at least one ring is saturated or partially unsaturated (but not aromatic) and comprises a heteroatom. A heterocyclyl can be attached to its pendant group at any heteroatom or carbon atom that results in a stable structure and any of the ring atoms can be optionally substituted. Representative heterocyclyls include ring systems in which (i) every ring is non-aromatic and at least one ring comprises a heteroatom, e.g., tetrahydrofuranyl, tetrahydrothienyl, pyrrolidinyl, pyrrolidonyl, piperidinyl, pyrrolinyl, decahydroquinolinyl, oxazolidinyl, piperazinyl, dioxanyl, dioxolanyl, diazepinyl, oxazepinyl, thiazepinyl, morpholinyl, and quinuclidinyl; (ii) at least one ring is non-aromatic and comprises a heteroatom and at least one other ring is an aromatic carbon ring, e.g., 1,2,3,4-tetrahydroquinolinyl; and (iii) at least one ring is non-aromatic and comprises a heteroatom and at least one other ring is aromatic and comprises a heteroatom, e.g., 3,4-dihydro-1H-pyrano[4,3-c]pyridinyl, and 1,2,3,4-tetrahydro-2,6-naphthyridinyl. In certain embodiments, the heterocyclyl is a monocyclic or bicyclic ring, wherein each of said rings contains 3-7 ring atoms where 1, 2, 3, or 4 of said ring atoms are a heteroatom independently selected from N, O, and S.

[0783] As described herein, compounds of the invention may contain “optionally substituted” moieties. In general, the term “substituted”, whether preceded by the term “optionally” or not, means that one or more hydrogens of the designated moiety are replaced with a suitable substituent. Unless otherwise indicated, an “optionally substituted” group may have a suitable substituent at each substitutable position of the group, and when more than one position in any given structure may be substituted with more than one substituent selected from a specified group, the substituent may be either the same or different at each position. Combinations of substituents envisioned under this invention are preferably those that result in the formation of stable or chemically feasible compounds. The term “stable”, as used herein, refers to compounds that are not substantially altered when subjected to conditions to allow for their production, detection, and, in certain embodiments, their recovery, purification, and use for one or more of the purposes disclosed herein.

[0784] The term “oxo” as used herein refers to ═O.

[0785] The term “thiocarbonyl” as used herein refers to C═S.

[0786] As used herein, the term “pharmaceutically acceptable salt” refers to those salts which are, within the scope of sound medical judgment, suitable for use in contact with the tissues of humans and lower animals without undue toxicity, irritation, allergic response and the like, and are commensurate with a reasonable benefit/risk ratio. Pharmaceutically acceptable salts are well known in the art. For example, Berge et al., describe pharmaceutically acceptable salts in detail in J. Pharmaceutical Sciences, 1977, 66, 1-19, incorporated herein by reference. Pharmaceutically acceptable salts of the compounds of this invention include those derived from suitable inorganic and organic acids and bases. Examples of pharmaceutically acceptable, nontoxic acid addition salts are salts of an amino group formed with inorganic acids such as hydrochloric acid, hydrobromic acid, phosphoric acid, sulfuric acid, and perchloric acid or with organic acids such as acetic acid, oxalic acid, maleic acid, tartaric acid, citric acid, succinic acid, or malonic acid or by using other methods known in the art such as ion exchange. Other pharmaceutically acceptable salts include adipate, alginate, ascorbate, aspartate, benzenesulfonate, benzoate, bisulfate, borate, butyrate, camphorate, camphorsulfonate, citrate, cyclopentanepropionate, digluconate, dodecylsulfate, ethanesulfonate, formate, fumarate, glucoheptonate, glycerophosphate, gluconate, hemisulfate, heptanoate, hexanoate, hydroiodide, 2-hydroxy-ethanesulfonate, lactobionate, lactate, laurate, lauryl sulfate, malate, maleate, malonate, methanesulfonate, 2-naphthalenesulfonate, nicotinate, nitrate, oleate, oxalate, palmitate, pamoate, pectinate, persulfate, 3-phenylpropionate, phosphate, picrate, pivalate, propionate, stearate, succinate, sulfate, tartrate, thiocyanate, p-toluenesulfonate, undecanoate, valerate salts, and the like. Salts derived from appropriate bases include alkali metal, alkaline earth metal, ammonium and N⁺(C₁₋₄ alkyl)₄⁻ salts. Representative alkali or alkaline earth metal salts include sodium, lithium, potassium, calcium, magnesium, and the like. Further pharmaceutically acceptable salts include, when appropriate, nontoxic ammonium, quaternary ammonium, and amine cations formed using counterions such as halide, hydroxide, carboxylate, sulfate, phosphate, nitrate, lower alkyl sulfonate, and aryl sulfonate.

[0787] The term “solvate” refers to forms of the compound that are associated with a solvent, usually by a solvolysis reaction. This physical association may include hydrogen bonding. Conventional solvents include water, methanol, ethanol, acetic acid, DMSO, THF, diethyl ether, and the like. The compounds of Formula (I), Formula (I-a), and/or Formula (II) may be prepared, e.g., in crystalline form, and may be solvated. Suitable solvates include pharmaceutically acceptable solvates and further include both stoichiometric solvates and non-stoichiometric solvates. In certain instances, the solvate will be capable of isolation, for example, when one or more solvent molecules are incorporated in the crystal lattice of a crystalline solid. “Solvate” encompasses both solution-phase and isolable solvates. Representative solvates include hydrates, ethanolates, and methanolates.

[0788] The term “hydrate” refers to a compound which is associated with water. Typically, the number of the water molecules contained in a hydrate of a compound is in a definite ratio to the number of the compound molecules in the hydrate. Therefore, a hydrate of a compound may be represented, for example, by the general formula R·x H₂O, wherein R is the compound and wherein x is a number greater than 0. A given compound may form more than one type of hydrates, including, e.g., monohydrates (x is 1), lower hydrates (x is a number greater than 0 and smaller than 1, e.g., hemihydrates (R·0.5 H₂O)), and polyhydrates (x is a number greater than 1, e.g., dihydrates (R·2 H₂O) and hexahydrates (R·6 H₂O)).

[0789] It is to be understood that compounds that have the same molecular formula but differ in the nature or sequence of bonding of their atoms or the arrangement of their atoms in space are termed “isomers”. Isomers that differ in the arrangement of their atoms in space are termed “stereoisomers”.

[0790] Stereoisomers that are not mirror images of one another are termed “diastereomers” and those that are non-superimposable mirror images of each other are termed “enantiomers”. When a compound has an asymmetric center, for example, it is bonded to four different groups and a pair of enantiomers is possible. An enantiomer can be characterized by the absolute configuration of its asymmetric center and is described by the R- and S-sequencing rules of Cahn and Prelog, or by the manner in which the molecule rotates the plane of polarized light and designated as dextrorotatory or levorotatory (i.e., as (+) or (−)-isomers respectively). A chiral compound can exist as either individual enantiomer or as a mixture thereof. A mixture containing equal proportions of the enantiomers is called a “racemic mixture”.

[0791] The term “tautomers” refer to compounds that are interchangeable forms of a particular compound structure, and that vary in the displacement of hydrogen atoms and electrons. Thus, two structures may be in equilibrium through the movement of π electrons and an atom (usually H). For example, enols and ketones are tautomers because they are rapidly interconverted by treatment with either acid or base. Another example of tautomerism is the aci- and nitro-forms of phenylnitromethane that are likewise formed by treatment with acid or base.

[0792] Tautomeric forms may be relevant to the attainment of the optimal chemical reactivity and biological activity of a compound of interest.

[0793] Unless otherwise stated, structures depicted herein are also meant to include all isomeric (e.g., enantiomeric, diastereomeric, and geometric (or conformational)) forms of the structure; for example, the R and S configurations for each asymmetric center, Z and E double bond isomers, and Z and E conformational isomers. Therefore, single stereochemical isomers as well as enantiomeric, diastereomeric, and geometric (or conformational) mixtures of the present compounds are within the scope of the invention. Unless otherwise stated, all tautomeric forms of the compounds of the invention are within the scope of the invention. Additionally, unless otherwise stated, structures depicted herein are also meant to include compounds that differ only in the presence of one or more isotopically enriched atoms. For example, compounds having the present structures including the replacement of hydrogen by deuterium or tritium, or the replacement of a carbon by a ¹³C- or ¹⁴C-enriched carbon are within the scope of this invention. In an embodiment, the hydrogen atoms present within any one of the compounds disclosed herein (for example, a compound of Formula (I)) are isotopically enriched in deuterium. Such compounds are useful, for example, as analytical tools, as probes in biological assays, or as therapeutic agents in accordance with the present invention.

[0794] Where a particular enantiomer is preferred, it may, in some embodiments be provided substantially free of the corresponding enantiomer, and may also be referred to as “optically enriched.” “Optically-enriched,” as used herein, means that the compound is made up of a significantly greater proportion of one enantiomer. In certain embodiments the compound is made up of at least about 90% by weight of a preferred enantiomer. In other embodiments the compound is made up of at least about 95%, 98%, or 99% by weight of a preferred enantiomer. Preferred enantiomers may be isolated from racemic mixtures by any method known to those skilled in the art, including chiral high pressure liquid chromatography (HPLC) and the formation and crystallization of chiral salts or prepared by asymmetric syntheses. See, for example, Jacques et al., Enantiomers, Racemates and Resolutions (Wiley Interscience, New York, 1981); Wilen, et al., Tetrahedron 33:2725 (1977); Eliel, E. L. Stereochemistry of Carbon Compounds (McGraw-Hill, NY, 1962); Wilen, S. H. Tables of Resolving Agents and Optical Resolutions p. 268 (E. L. Eliel, Ed., Univ. of Notre Dame Press, Notre Dame, IN 1972).

[0795] These and other exemplary substituents are described in more detail in the Detailed Description, Figures, Examples, and Claims. The invention is not intended to be limited in any manner by the above exemplary listing of substituents.

### COF1/CRBN-Binding Polypeptide, COF2/CRBN-Binding Polypeptide, or COF3/CRBN-Binding Polypeptide

[0796] Disclosed herein are, inter alia, fusion polypeptides that include a compound of Formula (I) (COF1)/CRBN-binding polypeptide, a compound of Formula (II) (COF2)/CRBN-binding polypeptide, or a compound of Formula (III) (COF3)/CRBN-binding polypeptide. In embodiments, in the presence of COF1 or COF2 (e.g., thalidomide and derivatives thereof, e.g., lenalidomide, pomalidomide, and thalidomide), or in the presence of COF3 (e.g., a compound disclosed in Table 29), the COF1/CRBN-, COF2/CRBN-, or COF3/CRBN-binding polypeptide in the fusion polypeptide increases a post-translational modification and/or degradation of the fusion polypeptide. In some embodiments, post-translational modification can include ubiquitination (e.g., mono- or poly-ubiquitination) of one or more amino acid residues, e.g., one or more of lysine or methionine, in the fusion polypeptide (e.g., one or all of: all or a part of a heterologous polypeptide and/or the COF1/CRBN-, COF2/CRBN-, or COF3/CRBN-binding polypeptide).

[0797] In certain embodiments, one or more lysine residues of the fusion polypeptide (e.g., all or a part of a heterologous polypeptide and/or the COF1/CRBN-, COF2/CRBN-, or COF3/CRBN-binding polypeptide) are ubiquitinated. In some embodiments, one or more methionine residues of the fusion polypeptide (e.g., all or a part of a heterologous polypeptide and/or the COF1/CRBN-, COF2/CRBN-, or COF3/CRBN-binding polypeptide) are ubiquitinated (e.g., mono- or poly-ubiquitinated).

[0798] Without wishing to be bound by theory, in some embodiments, inactivation, e.g., degradation, of a fusion polypeptide described herein can include one, two, three or all of following steps, e.g., in a cell or a reaction mixture:
[0799] (1) association of the fusion polypeptide that comprises the COF1/CRBN-, COF2/CRBN-, or COF3/CRBN-binding polypeptide to one or more subunits (e.g., CRBN) of a ubiquitin ligase complex (e.g., an E3 ubiquitin ligase complex) in the presence of COF1 or COF2 (e.g., thalidomide and derivatives thereof (e.g., lenalidomide)) or in the presence of COF3 (e.g., a compound disclosed in Table 29);
[0800] (2) ubiquitination of the fusion polypeptide (e.g., ubiquitination at a heterologous polypeptide and/or the COF1/CRBN-, COF2/CRBN-, or COF3/CRBN-binding polypeptide), thereby providing a ubiquitinated fusion polypeptide; and
[0801] (3) degradation of the ubiquitinated fusion polypeptide.

[0802] In some embodiments, any COF1/CRBN-, COF2/CRBN-, or COF3/CRBN-binding polypeptide described herein increases a post-translational modification and/or degradation of the fusion polypeptide in the presence of COF1, COF2, or COF3, e.g., relative to the modification and/or degradation in the absence of COF1, COF2, or COF3. In one embodiment, the COF1/CRBN-, COF2/CRBN-, or COF3/CRBN-binding polypeptide increases selective ubiquitination of the fusion polypeptide in the presence of COF1, COF2, or COF3, e.g., relative to the ubiquitination in the absence of COF1, COF2, or COF3.

[0803] In some embodiments, a COF1/CRBN-, COF2/CRBN-, or COF3/CRBN-binding polypeptide is derived from an amino acid sequence and/or structural motif (e.g., a domain) that binds to one or more components of a ubiquitin ligase complex (e.g., the E3 ubiquitin ligase complex) in the presence of COF1, COF2, or COF3. In some embodiments, COF1 or COF2 is a thalidomide class of compounds (e.g., lenalidomide, pomalidomide, and thalidomide), e.g., as described herein. In some embodiments, COF3 is a compound disclosed in Table 29. In some embodiments, the COF1/CRBN-, COF2/CRBN-, or COF3/CRBN-binding polypeptide comprises a zinc finger domain (e.g., a zinc finger 2 domain) or a portion thereof. In some embodiments, the COF1/CRBN-, COF2/CRBN-, or COF3/CRBN-binding polypeptide comprises a β turn. In some embodiments, the COF1/CRBN- or COF2/CRBN-binding polypeptide comprises a β turn of an Ikaros family of transcription factors, e.g., IKZF1 or IKZF3, or a sequence substantially identical thereto (e.g., at least 85%, 87, 90, 95, 97, 98, 99, or 100% identical thereto). In some embodiments, the COF1/CRBN- or COF2/CRBN-binding polypeptide comprises a R hairpin of an Ikaros family of transcription factors, e.g., IKZF1 or IKZF3, or a sequence substantially identical thereto (e.g., at least 85%, 87, 90, 95, 97, 98, 99, or 100% to a β hairpin of IKZF1 or IKZF3, e.g., as described in Kronke, J. et al. (2014) Science 343(6168):301-5). In some embodiments, the COF3/CRBN-binding polypeptide comprises a β turn of IKZF2, or a sequence substantially identical thereto (e.g., at least 85%, 87, 90, 95, 97, 98, 99, or 100% identical thereto). In some embodiments, the COF3/CRBN-binding polypeptide comprises a β hairpin of IKZF2, or a sequence substantially identical thereto (e.g., at least 85%, 87, 90, 95, 97, 98, 99, or 100% identical thereto).

[0804] In some embodiments, the COF1/CRBN- or COF2/CRBN-binding polypeptide comprises about 10 to about 95 amino acid residues, about 15 to about 90 amino acid residues, about 20 to about 85 amino acid residues, about 25 to about 80 amino acid residues, about 30 to about 75 amino acid residues, about 35 to about 70 amino acid residues, about 40 to about 65 amino acid residues, about 45 to about 65 amino acid residues, about 50 to about 65 amino acid residues, or about 55 to about 65 amino acid residues of IKZF1 (e.g., SEQ ID NO: 20) or IKZF3 (e.g., SEQ ID NO: 19) or a sequence substantially identical thereto (e.g., at least 85%, 87, 90, 95, 97, 98, 99, or 100% identical thereto). In some embodiments, the COF1/CRBN- or COF2/CRBN-binding polypeptide comprises at least 10 amino acids, at least 15 amino acids, at least 20 amino acids, at least 25 amino acids, at least 30 amino acids, at least 35 amino acids, at least 40 amino acids, at least 45 amino acids, at least 50 amino acids, at least 55 amino acids, at least 60 amino acids, at least 65 amino acids, at least 70 amino acids, at least 75 amino acids, at least 80 amino acids, at least 85 amino acids, at least 90 amino acids, at least 90 amino acids, or at least 95 amino acids of IKZF1 (e.g., SEQ ID NO: 20) or IKZF3 (e.g., SEQ ID NO: 19), or a sequence substantially identical thereto (e.g., at least 85%, 87, 90, 95, 97, 98, 99, or 100% identical thereto). In some embodiments, the COF1/CRBN- or COF2/CRBN-binding polypeptide comprises or consists of the amino acid sequences selected from the group consisting of SEQ ID NOs: 1-6, 11-15, 40, 41-43, 77, 78, 84-86, and 100.

[0805] In some embodiments, the COF3/CRBN-binding polypeptide comprises about 10 to about 95 amino acid residues, about 15 to about 90 amino acid residues, about 20 to about 85 amino acid residues, about 25 to about 80 amino acid residues, about 30 to about 75 amino acid residues, about 35 to about 70 amino acid residues, about 40 to about 65 amino acid residues, about 45 to about 65 amino acid residues, about 50 to about 65 amino acid residues, or about 55 to about 65 amino acid residues of IKZF2 (e.g., SEQ ID NO: 21) or a sequence substantially identical thereto (e.g., at least 85%, 87, 90, 95, 97, 98, 99, or 100% identical thereto). In some embodiments, the COF3/CRBN-binding polypeptide comprises at least 10 amino acids, at least 15 amino acids, at least 20 amino acids, at least 25 amino acids, at least 30 amino acids, at least 35 amino acids, at least 40 amino acids, at least 45 amino acids, at least 50 amino acids, at least 55 amino acids, at least 60 amino acids, at least 65 amino acids, at least 70 amino acids, at least 75 amino acids, at least 80 amino acids, at least 85 amino acids, at least 90 amino acids, at least 90 amino acids, or at least 95 amino acids of IKZF2 (e.g., SEQ ID NO: 21), or a sequence substantially identical thereto (e.g., at least 85%, 87, 90, 95, 97, 98, 99, or 100% identical thereto). In some embodiments, the COF3/CRBN-binding polypeptide comprises or consists of the amino acid sequences selected from the group consisting of SEQ ID NOs: 109, 113, and 114.

[0806] In some embodiments, exemplary full-length sequences of IKZF1, IKZF2, IKZF3, IKZF4, and IKZF5 or fragment thereof are provided in Table 1.

TABLE 1
Exemplary IKZF sequences, variants, or fragments

| SEQ ID | | |
|---|---|---|
| NO | Comment | Sequence |
| SEQ ID | IKZF3 136-180 and 236- | MHKRSHTGERPFQCNQCGASFTQKGNLLRHIKLHTGE |
| NO: 1 | 249 (with N-terminal | KPFKCHLCNTASAEARHIKAEMG |
| | methionine) | |
| SEQ ID | IKZF3 136-180 and 236- | HKRSHTGERPFQCNQCGASFTQKGNLLRHIKLHTGEKP |
| NO: 3 | 249 (without N-terminal | FKCHLCNTASAEARHIKAEMG |
| | methionine) | |
| SEQ ID | Lysine-free IKZF3 136- | MHRRSHTGERPFQCNQCGASFTQRGNLLRHIRLHTGER |
| NO: 2 | 180 and 236-249 variant | PFRCHLCNTASAEARHIRAEMG |
| | (with N-terminal | |
| | methionine) | |
| SEQ ID | Lysine-free IKZF3 136- | HRRSHTGERPFQCNQCGASFTQRGNLLRHIRLHTGERP |
| NO: 4 | 180 and 236-249 variant | FRCHLCNTASAEARHIRAEMG |
| | (without N-terminal | |
| | methionine) | |
| SEQ ID | IKZF3 136-180 (with N- | MHKRSHTGERPFQCNQCGASFTQKGNLLRHIKLHTGE |
| NO: 77 | terminal methionine) | KPFKCHLCN |
| SEQ ID | IKZF3 136-180 (without | HKRSHTGERPFQCNQCGASFTQKGNLLRHIKLHTGEKP |
| NO: 5 | N-terminal methionine) | FKCHLCN |
| SEQ ID | Lysine-free IKZF3 136- | HRRSHTGERPFQCNQCGASFTQRGNLLRHIRLHTGERP |
| NO: 41 | 180 | FRCHLCN |
| SEQ ID | IKZF3 136-170 (with N- | MHKRSHTGERPFQCNQCGASFTQKGNLLRHIKLHTG |
| NO: 78 | terminal methionine) | |
| SEQ ID | IKZF3 136-170 (without | HKRSHTGERPFQCNQCGASFTQKGNLLRHIKLHTG |
| NO: 6 | N-terminal methionine) | |
| SEQ ID | Lysine-free IKZF3 136- | HRRSHTGERPFQCNQCGASFTQRGNLLRHIRLHTG |
| NO: 42 | 170 | |
| SEQ ID | IKZF3 140-170 (with N- | MHTGERPFQCNQCGASFTQKGNLLRHIKLHTG |
| NO: 79 | terminal methionine) | |
| SEQ ID | IKZF3 140-170 (without | HTGERPFQCNQCGASFTQKGNLLRHIKLHTG |
| NO: 7 | N-terminal methionine) | |
| SEQ ID | IKZF3 140-169 (with N- | MHTGERPFQCNQCGASFTQKGNLLRHIKLHT |
| NO: 80 | terminal methionine) | |
| SEQ ID | IKZF3 140-169 (without | HTGERPFQCNQCGASFTQKGNLLRHIKLHT |
| NO: 24 | N-terminal methionine) | |
| SEQ ID | IKZF3 141-163 (with N- | MTGERPFQCNQCGASFTQKGNLLR |
| NO: 81 | terminal methionine) | |
| SEQ ID | IKZF3 141-163 (without | TGERPFQCNQCGASFTQKGNLLR |
| NO: 8 | N-terminal methionine) | |
| SEQ ID | IKZF3 145-170 (with N- | MPFQCNQCGASFTQKGNLLRHIKLHTG |
| NO: 82 | terminal methionine) | |
| SEQ ID | IKZF3 145-170 (without | PFQCNQCGASFTQKGNLLRHIKLHTG |
| NO: 9 | N-terminal methionine) | |
| SEQ ID | IKZF3 145-155 (with N- | MPFQCNQCGASF |
| NO: 83 | terminal methionine) | |
| SEQ ID | IKZF3 145-155 (without | PFQCNQCGASF |
| NO: 10 | N-terminal methionine) | |
| SEQ ID | IKZF3 236-249 | TASAEARHIKAEMG |
| NO: 11 | | |
| SEQ ID | Lysine-free IKZF3 236- | TASAEARHIRAEMG |
| NO: 43 | 249 | |
| SEQ ID | IKZF3 136-180 and 236- | MHKRSHTGERPFQCNQCGASFTQKGNLLRHIKLHTGE |
| NO: 12 | 249 K245R (with N- | KPFKCHLCNTASAEARHIRAEMG |
| | terminal methionine) | |
| SEQ ID | IKZF3 136-180 and 236- | HKRSHTGERPFQCNQCGASFTQKGNLLRHIKLHTGEKP |
| NO: 84 | 249 K245R (without N- | FKCHLCNTASAEARHIRAEMG |
| | terminal methionine) | |
| SEQ ID | IKZF3 136-180 and 236- | MHKRSHTGERPFQCNQCGASFTQKGNLLRHIKLHTGE |
| NO: 13 | 249 K2455 (with N- | KPFKCHLCNTASAEARHISAEMG |
| | terminal methionine) | |
| SEQ ID | IKZF3 136-180 and 236- | HKRSHTGERPFQCNQCGASFTQKGNLLRHIKLHTGEKP |
| NO: 100 | 249 K2455 (without N- | FKCHLCNTASAEARHISAEMG |
| | terminal methionine) | |
| SEQ ID | IKZF3 136-180 MALEK | MHKRSHTGERPFQCNQCGASFTQKGNLLRHIKLHTGE |
| NO: 14 | (with N-terminal | KPFKCHLCNMALEKMALEKMALE |
| | methionine) | |
| SEQ ID | IKZF3 136-180 MALEK | HKRSHTGERPFQCNQCGASFTQKGNLLRHIKLHTGEKP |
| NO: 85 | (without N-terminal | FKCHLCNMALEKMALEKMALE |
| | methionine) | |
| SEQ ID | IKZF3 136-170 MALEK | MHKRSHTGERPFQCNQCGASFTQKGNLLRHIKLHTGM |
| NO: 15 | (with N-terminal | ALEKMALEKMALE |
| | methionine) | |
| SEQ ID | IKZF3 136-170 MALEK | HKRSHTGERPFQCNQCGASFTQKGNLLRHIKLHTGMA |
| NO: 86 | (without N-terminal | LEKMALEKMALE |
| | methionine) | |
| SEQ ID | IKZF3 140-170 MALEK | MHTGERPFQCNQCGASFTQKGNLLRHIKLHTGMALEK |
| NO: 16 | (with N-terminal | MALEKMALE |
| | methionine) | |
| SEQ ID | IKZF3 140-170 MALEK | HTGERPFQCNQCGASFTQKGNLLRHIKLHTGMALEKM |
| NO: 87 | (without N-terminal | ALEKMALE |
| | methionine) | |
| SEQ ID | IKZF3 141-163 MALEK | MTGERPFQCNQCGASFTQKGNLLRMALEKMALEKMA |
| NO: 17 | (with N-terminal | LE |
| | methionine) | |
| SEQ ID | IKZF3 141-163 MALEK | TGERPFQCNQCGASFTQKGNLLRMALEKMALEKMALE |
| NO: 88 | (without N-terminal | |
| | methionine) | |
| SEQ ID | IKZF3 145-155 MALEK | MPFQCNQCGASFMALEKMALEKMALE |
| NO: 18 | (with N-terminal | |
| | methionine) | |
| SEQ ID | IKZF3 145-155 MALEK | PFQCNQCGASFMALEKMALEKMALE |
| NO: 89 | (without N-terminal | |
| | methionine) | |
| SEQ ID | IKZF3 136-180 Q147H | MHKRSHTGERPFHCNQCGASFTQKGNLLRHIKLHTGE |
| NO: 27 | (with N-terminal | KPFKCHLCN |
| | methionine) | |
| SEQ ID | IKZF3 136-180 Q147H | HKRSHTGERPFHCNQCGASFTQKGNLLRHIKLHTGEKP |
| NO: 90 | (without N-terminal | FKCHLCN |
| | methionine) | |
| SEQ ID | IKZF2 130-174 and 230- | HKRSHTGERPFHCNQCGASFTQKGNLLRHIKLHSGEKP |
| NO: 109 | 243 | FKCPFCSAGQVMSHHVPPMED |
| SEQ ID | IKZF2 130-174 | HKRSHTGERPFHCNQCGASFTQKGNLLRHIKLHSGEKP |
| NO: 113 | | FKCPFCS |
| SEQ ID | IKZF2 230-243 | AGQVMSHHVPPMED |
| NO: 114 | | |
| SEQ ID | IKZF3 full length | MEDIQTNAELKSTQEQSVPAESAAVLNDYSLTKSHEME |
| NO: 19 | | NVDSGEGPANEDEDIGDDSMKVKDEYSERDENVLKSE |
| | | PMGNAEEPEIPYSYSREYNEYENIKLERHVVSFDSSRPT |
| | | SGKMNCDVCGLSCISFNVLMVHKRSHTGERPFQCNQC |
| | | GASFTQKGNLLRHIKLHTGEKPFKCHLCNYACQRRDAL |
| | | TGHLRTHSVEKPYKCEFCGRSYKQRSSLEEHKERCRTF |
| | | LQSTDPGDTASAEARHIKAEMGSERALVLDRLASNVA |
| | | KRKSSMPQKFIGEKRHCFDVNYNSSYMYEKESELIQTR |
| | | MMDQAINNAISYLGAEALRPLVQTPPAPTSEMVPVISS |
| | | MYPIALTRAEMSNGAPQELEKKSIHLPEKSVPSERGLSP |
| | | NNSGHDSTDTDSNHEERQNHIYQQNHMVLSRARNGMP |
| | | LLKEVPRSYELLKPPPICPRDSVKVINKEGEVMDVYRC |
| | | DHCRVLFLDYVMFTIHMGCHGFRDPFECNMCGYRSHD |
| | | RYEFSSHIARGEHRALLK |
| SEQ ID | IKZF1 full length | MDADEGQDMSQVSGKESPPVSDTPDEGDEPMPIPEDLS |
| NO: 20 | | TTSGGQQSSKSDRVVASNVKVETQSDEENGRACEMNG |
| | | EECAEDLRMLDASGEKMNGSHRDQGSSALSGVGGIRL |
| | | PNGKLKCDICGIICIGPNVLMVHKRSHTGERPFQCNQCG |
| | | ASFTQKGNLLRHIKLHSGEKPFKCHLCNYACRRRDALT |
| | | GHLRTHSVGKPHKCGYCGRSYKQRSSLEEHKERCHNY |
| | | LESMGLPGTLYPVIKEETNHSEMAEDLCKIGSERSLVLD |
| | | RLASNVAKRKSSMPQKFLGDKGLSDTPYDSSASYEKEN |
| | | EMMKSHVMDQAINNAINYLGAESLRPLVQTPPGGSEV |
| | | VPVISPMYQLHKPLAEGTPRSNHSAQDSAVENLLLLSK |
| | | AKLVPSEREASPSNSCQDSTDTESNNEEQRSGLIYLTNH |
| | | IAPHARNGLSLKEEHRAYDLLRAASENSQDALRVVSTS |
| | | GEQMKVYKCEHCRVLFLDHVMYTIHMGCHGFRDPFEC |
| | | NMCGYHSQDRYEFSSHITRGEHRFHMS |
| SEQ ID | IKZF2 full length | METEAIDGYITCDNELSPEREHSNMAIDLTSSTPNGQHA |
| NO: 21 | | SPSHMTSTNSVKLEMQSDEECDRKPLSREDEIRGHDEG |
| | | SSLEEPLIESSEVADNRKVQELQGEGGIRLPNGKLKCDV |
| | | CGMVCIGPNVLMVHKRSHTGERPFHCNQCGASFTQKG |
| | | NLLRHIKLHSGEKPFKCPFCSYACRRRDALTGHLRTHS |
| | | VGKPHKCNYCGRSYKQRSSLEEHKERCHNYLQNVSME |
| | | AAGQVMSHHVPPMEDCKEQEPIMDNNISLVPFERPAVI |
| | | EKLTGNMGKRKSSTPQKFVGEKLMRFSYPDIHFDMNL |
| | | TYEKEAELMQSHMMDQAINNAITYLGAEALHPLMQHP |
| | | PSTIAEVAPVISSAYSQVYHPNRIERPISRETADSHENNM |
| | | DGPISLIRPKSRPQEREASPSNSCLDSTDSESSHDDHQSY |
| | | QGHPALNPKRKQSPAYMKEDVKALDTTKAPKGSLKDI |
| | | YKVFNGEGEQIRAFKCEHCRVLFLDHVMYTIHMGCHG |
| | | YRDPLECNICGYRSQDRYEFSSHIVRGEHTFH |
| SEQ ID | IKZF4 full length | MHTPPALPRRFQGGGRVRTPGSHRQGKDNLERDPSGG |
| NO: 22 | | CVPDFLPQAQDSNHFIMESLFCESSGDSSLEKEFLGAPV |
| | | GPSVSTPNSQHSSPSRSLSANSIKVEMYSDEESSRLLGPD |
| | | ERLLEKDDSVIVEDSLSEPLGYCDGSGPEPHSPGGIRLPN |
| | | GKLKCDVCGMVCIGPNVLMVHKRSHTGERPFHCNQCG |
| | | ASFTQKGNLLRHIKLHSGEKPFKCPFCNYACRRRDALT |
| | | GHLRTHSVSSPTVGKPYKCNYCGRSYKQQSTLEEHKER |
| | | CHNYLQSLSTEAQALAGQPGDEIRDLEMVPDSMLHSSS |
| | | ERPTFIDRLANSLTKRKRSTPQKFVGEKQMRFSLSDLPY |
| | | DVNSGGYEKDVELVAHHSLEPGFGSSLAFVGAEHLRPL |
| | | RLPPTNCISELTPVISSVYTQMQPLPGRLELPGSREAGEG |
| | | PEDLADGGPLLYRPRGPLTDPGASPSNGCQDSTDTESN |
| | | HEDRVAGVVSLPQGPPPQPPPTIVVGRHSPAYAKEDPK |
| | | PQEGLLRGTPGPSKEVLRVVGESGEPVKAFKCEHCRILF |
| | | LDHVMFTIHMGCHGFRDPFECNICGYHSQDRYEFSSHI |
| | | VRGEHKVG |
| SEQ ID | IKZF5 full length | MGEKKPEPLDFVKDFQEYLTQQTHHVNMISGSVSGDK |
| NO: 23 | | EAEALQGAGTDGDQNGLDHPSVEVSLDENSGMLVDGF |
| | | ERTFDGKLKCRYCNYASKGTARLIEHIRIHTGEKPHRCH |
| | | LCPFASAYERHLEAHMRSHTGEKPYKCELCSFRCSDRS |
| | | NLSHHRRRKHKMVPIKGTRSSLSSKKMWGVLQKKTSN |
| | | LGYSRRALINLSPPSMVVQKPDYLNDFTHEIPNIQTDSY |
| | | ESMAKTTPTGGLPRDPQELMVDNPLNQLSTLAGQLSSL |
| | | PPENQNPASPDVVPCPDEKPFMIQQPSTQAVVSAVSASI |
| | | PQSSSPTSPEPRPSHSQRNYSPVAGPSSEPSAHTSTPSIGN |
| | | SQPSTPAPALPVQDPQLLHHCQHCDMYFADNILYTIHM |
| | | GCHGYENPFQCNICGCKCKNKYDFACHFARGQHNQH |

### Degradation Compounds

[0807] Disclosed herein are, inter alia, degradation compounds that can, e.g., increase the ubiquitination and/or degradation of the fusion proteins including the degradation tag.

[0808] In some embodiments, the degradation compound comprises a member of the thalidomide class of compounds. In some embodiments, members of the thalidomide class of compounds include, but are not limited to, lenalidomide (CC-5013), pomalidomide (CC-4047 or ACTIMID), thalidomide, or salts or derivatives thereof. In some embodiments, the degradation compound can be a mixture of one, two, three, or more members of the thalidomide class of compounds. Thalidomide analogs and immunomodulatory properties of thalidomide analogs are described in Bodera and Stankiewicz, Recent Pat Endocr Metab Immune Drug Discov. 2011 September; 5(3):192-6, which is hereby incorporated by reference in its entirety. The structural complex of thalidomide analogs and the E3 ubiquitin is described in Gandhi et al., Br J Haematol. 2014 March; 164(6):811-21, which is hereby incorporated by reference in its entirety. The modulation of the E3 ubiquitin ligase by thalidomide analogs is described in Fischer et al., Nature. 2014 Aug. 7; 512(7512):49-53, which is hereby incorporated by reference in its entirety.

[0809] In some embodiments, the degradation compound comprises a compound of Formula (I):

[chemical structure]

or a pharmaceutically acceptable salt, ester, hydrate, solvate, or tautomer thereof, wherein:
[0810] X is O or S;
[0811] R¹ is C₁-C₆ alkyl, C₂-C₆ alkenyl, C₂-C₆ alkynyl, C₁-C₆ heteroalkyl, carbocyclyl, heterocyclyl, aryl, or heteroaryl, each of which is independently and optionally substituted by one or more R⁴;
[0812] each of R^{2a} and R^{2b} is independently hydrogen or C₁-C₆ alkyl; or R^{2a} and R^{2b} together with the carbon atom to which they are attached form a carbonyl group or a thiocarbonyl group;
[0813] each of R³ is independently C₁-C₆ alkyl, C₂-C₆ alkenyl, C₂-C₆ alkynyl, C₁-C₆ heteroalkyl, halo, cyano, —C(O)R^{A}, —C(O)OR^{B}, —OR^{B}, —N(R^{C})(R^{D}), —C(O)N(R^{C})(R^{D}), —N(R^{C})C(O)R^{A}, —S(O)ₓR^{E}, —S(O)ₓN(R^{C})(R^{D}), or —N(R^{C})S(O)ₓR^{E}, wherein each alkyl, alkenyl, alkynyl, and heteroalkyl is independently and optionally substituted with one or more R⁶.
[0814] each R⁴ is independently C₁-C₆ alkyl, C₂-C₆ alkenyl, C₂-C₆ alkynyl, C₁-C₆ heteroalkyl, halo, cyano, oxo, —C(O)R^{A}, —C(O)OR^{B}, —OR^{B}, —N(R^{C})(R^{D}), —C(O)N(R^{C})(R^{D}), —N(R^{C})C(O)R^{A}, —S(O)ₓR^{E}, —S(O)ₓN(R^{C})(R^{D}), —N(R^{C})S(O)ₓR^{E}, carbocyclyl, heterocyclyl, aryl, or heteroaryl, wherein each alkyl, alkenyl, alkynyl, heteroalkyl, carbocyclyl, heterocyclyl, aryl, and heteroaryl is independently and optionally substituted with one or more R⁷;
[0815] each of R^{A}, R^{B}, R^{C}, R^{D}, and R^{E} is independently hydrogen or C₁-C₆ alkyl;
[0816] each R⁶ is independently C₁-C₆ alkyl, oxo, cyano, —OR^{B}, —N(R^{C})(R^{D}), —C(O)N(R^{C})(R^{D}), —N(R^{C})C(O)R^{A}, aryl, or heteroaryl, wherein each aryl and heteroaryl is independently and optionally substituted with one or more R⁸.
[0817] each R⁷ is independently halo, oxo, cyano, —OR^{B}, —N(R^{C})(R^{D}), —C(O)N(R^{C})(R^{D}), or —N(R^{C})C(O)R^{A};
[0818] each R⁸ is independently C₁-C₆ alkyl, cyano, —OR^{B}, —N(R^{C})(R^{D}), —C(O)N(R^{C})(R^{D}), or —N(R^{C})C(O)R^{A};
[0819] n is 0, 1, 2, 3 or 4; and
[0820] x is 0, 1, or 2.

[0821] In some embodiments, X is O.

[0822] In some embodiments, R¹ is C₁-C₆ alkyl, C₂-C₆ alkenyl, C₂-C₆ alkynyl, C₁-C₆ heteroalkyl, carbocyclyl, heterocyclyl, aryl, or heteroaryl, each of which is independently and optionally substituted by 1-12 R⁴ (e.g., 1 R⁴, 2 R⁴, 3 R⁴, 4 R⁴, 5 R⁴, 6 R⁴, 7 R⁴, 8 R⁴, 9 R⁴, 10 R⁴, 11 R⁴, or 12 R⁴). In some embodiments, R¹ is heterocyclyl. In some embodiments, R¹ is a 6-membered heterocyclyl or a 5-membered heterocyclyl. In some embodiments, R¹ is a 6-membered heterocyclyl or a 5-membered heterocyclyl, each of which is independently and optionally substituted by 1-6 R⁴ (e.g., 1 R⁴, 2 R⁴, 3 R⁴, 4 R⁴, 5 R⁴, or 6 R⁴). In some embodiments, R¹ is a nitrogen-containing heterocyclyl. In some embodiments, R¹ is piperidinyl (e.g., piperidine-2,6-dionyl).

[0823] In some embodiments, each of R^{2a} and R^{2b} is independently hydrogen. In some embodiments, R^{2a} and R^{2b} together with the carbon to which they are attached form a carbonyl group.

[0824] In some embodiments, each of R³ is independently C₁-C₆ alkyl, C₂-C₆ alkenyl, C₂-C₆ alkynyl, C₁-C₆ heteroalkyl, halo, cyano, —C(O)R^{A}, —C(O)OR^{B}, —OR^{B}, —N(R^{C})(R^{D}), —C(O)N(R^{C})(R^{D}), —N(R^{C})C(O)R^{A}, —S(O)ₓR^{E}, —S(O)ₓN(R^{C})(R^{D}), or —N(R^{C})S(O)ₓR^{E}, wherein each alkyl, alkenyl, alkynyl, and heteroalkyl is independently and optionally substituted with 1-12 R⁶ (e.g., 1 R⁶, 2 R⁶, 3 R⁶, 4 R⁶, 5 R⁶, 6 R⁶, 7 R⁶, 8 R⁶, 9 R⁶, 10 R⁶, 11 R⁶, or 12 R⁶). In some embodiments, R³ is C₁-C₆ heteroalkyl, —N(R^{C})(R^{D}) or —N(R^{C})C(O)R^{A}. In some embodiments, R³ is C₁-C₆ heteroalkyl (e.g., CH₂NHC(O)CH₂-phenyl-t-butyl), —N(R^{C})(R^{D}) (e.g., NH₂), or —N(R^{C})C(O)R^{A} (e.g., NHC(O)CH₃). In some embodiments, R³ is C₁-C₆ heteroalkyl optionally substituted with 1-6 R⁶ (e.g., 1 R⁶, 2 R⁶, 3 R⁶, 4 R⁶, 5 R⁶, or 6 R⁶).

[0825] In some embodiments, each R⁴ is independently C₁-C₆ alkyl, C₂-C₆ alkenyl, C₂-C₆ alkynyl, C₁-C₆ heteroalkyl, halo, cyano, oxo, —C(O)R^{A}, —C(O)OR^{B}, —OR^{B}, —N(R^{C})(R^{D}), —C(O)N(R^{C})(R^{D}), —N(R^{C})C(O)R^{A}, —S(O)ₓR^{E}, —S(O)ₓN(R^{C})(R^{D}), —N(R^{C})S(O)ₓR^{E}, carbocyclyl, heterocyclyl, aryl, or heteroaryl, wherein each alkyl, alkenyl, alkynyl, heteroalkyl, carbocyclyl, heterocyclyl, aryl, and heteroaryl is independently and optionally substituted with 1-12 R⁷ (e.g., 1 R⁷, 2 R⁷, 3 R⁷, 4 R⁷, 5 R⁷, 6 R⁷, 7 R⁷, 8 R⁷, 9 R⁷, 10 R⁷, 11 R⁷, or 12 R⁷).

[0826] In some embodiments, each R⁶ is independently C₁-C₆ alkyl, oxo, cyano, —OR^{B}, —N(R^{C})(R^{D}), —C(O)N(R^{C})(R^{D}), —N(R^{C})C(O)R^{A}, aryl, or heteroaryl, wherein each aryl and heteroaryl is independently and optionally substituted with 1-6 R⁸ (e.g., 1 R⁸, 2 R⁸, 3 R⁸, 4 R⁸, 5 R⁸, or 6 R⁸).

[0827] In an embodiment, X is O. In an embodiment, R¹ is heterocyclyl (e.g., piperidine-2,6-dionyl). In an embodiment, each of R^{2a} and R^{2b} is independently hydrogen. In an embodiment, n is 1. In an embodiment, R³ is —N(R^{C})(R^{D}) (e.g., —NH₂). In an embodiment, the degradation compound comprises lenalidomide, e.g., 3-(4-amino-1-oxoisoindolin-2-yl)piperidine-2,6-dione, or a pharmaceutically acceptable salt thereof. In an embodiment, the degradation compound is lenalidomide, e.g., according to the following formula:

[chemical structure]

[0828] In an embodiment, X is O. In an embodiment, R¹ is heterocyclyl (e.g., piperidinyl-2,6-dionyl). In some embodiments, R^{2a} and R^{2b} together with the carbon to which they are attached form a carbonyl group. In an embodiment, n is 1. In an embodiment, R³ is —N(R^{C})(R^{D}) (e.g., —NH₂). In an embodiment, the degradation compound comprises pomalidomide, e.g., 4-amino-2-(2,6-dioxopiperidin-3-yl)isoindoline-1,3-dione, or a pharmaceutically acceptable salt thereof. In an embodiment, the degradation compound is pomalidomide, e.g., according to the following formula:

[chemical structure]

[0829] In an embodiment, X is O. In an embodiment, R¹ is heterocyclyl (e.g., piperidinyl-2,6-dionyl). In an embodiment, R^{2a} and R^{2b} together with the carbon to which they are attached form a carbonyl group. In an embodiment, n is 0. In an embodiment, the degradation compound comprises thalidomide, e.g., 2-(2,6-dioxopiperidin-3-yl)isoindoline-1,3-dione, or a pharmaceutically acceptable salt thereof. In an embodiment, the degradation product is thalidomide, e.g., according to the following formula:

[chemical structure]

[0830] In an embodiment, X is O. In an embodiment, R¹ is heterocyclyl (e.g., piperidine-2,6-dionyl). In an embodiment, each of R^{2a} and R^{2b} is independently hydrogen. In an embodiment, n is 1. In an embodiment, R³ is C₁-C₆ heteroalkyl (e.g., CH₂NHC(O)CH₂-phenyl-t-butyl). In an embodiment, R³ is C₁-C₆ heteroalkyl substituted with 1 R⁶ (e.g., CH₂NHC(O)CH₂-phenyl-t-butyl). In an embodiment, the degradation compound comprises 2-(4-(tert-butyl)phenyl)-N-((2-(2,6-dioxopiperidin-3-yl)-1-oxoisoindolin-5-yl)methyl)acetamide, or a pharmaceutically acceptable salt thereof. In an embodiment, the degradation compound has the structure as shown in the following formula:

[chemical structure]

[0831] In some embodiments, the degradation compound is a compound of Formula (I-a):

[chemical structure]

or a pharmaceutically acceptable salt, ester, hydrate, or tautomer thereof, wherein:
[0832] Ring A is carbocyclyl, heterocyclyl, aryl, or heteroaryl, each of which is independently and optionally substituted with one or more R⁴;
[0833] M is absent, C₁-C₆ alkyl, C₂-C₆ alkenyl, C₂-C₆ alkynyl, or C₁-C₆ heteroalkyl, wherein each alkyl, alkenyl, alkynyl, and heteroalkyl is independently and optionally substituted with one or more R⁴;
[0834] each of R^{2a} and R^{2b} is independently hydrogen or C₁-C₆ alkyl; or R^{2a} and R^{2b} together with the carbon atom to which they are attached to form a carbonyl group or thiocarbonyl group;
[0835] R^{3a} is hydrogen, C₁-C₆ alkyl, C₂-C₆ alkenyl, C₂-C₆ alkynyl, C₁-C₆ heteroalkyl, halo, cyano, —C(O)R^{A}, —C(O)OR^{B}, —OR^{B}, —N(R^{C})(R^{D}), —C(O)N(R^{C})(R^{D}), —N(R^{C})C(O)R^{A}, —S(O)ₓR^{E}, —S(O)ₓN(R^{C})(R^{D}), or —N(R^{C})S(O)ₓR^{E}, wherein each alkyl, alkenyl, alkynyl, and heteroalkyl is independently and optionally substituted with one or more R⁶.
[0836] each of R³ is independently C₁-C₆ alkyl, C₂-C₆ alkenyl, C₂-C₆ alkynyl, C₁-C₆ heteroalkyl, halo, cyano, —C(O)R^{A}, —C(O)OR^{B}, —OR^{B}, —N(R^{C})(R^{D}), —C(O)N(R^{C})(R^{D}), —N(R^{C})C(O)R^{A}, —S(O)ₓR^{E}, —S(O)ₓN(R^{C})(R^{D}), or —N(R^{C})S(O)ₓR^{E}, wherein each alkyl, alkenyl, alkynyl, and heteroalkyl is independently and optionally substituted with one or more R⁶.
[0837] each R⁴ is independently C₁-C₆ alkyl, C₂-C₆ alkenyl, C₂-C₆ alkynyl, C₁-C₆ heteroalkyl, halo, cyano, oxo, —C(O)R^{A}, —C(O)OR^{B}, —OR^{B}, —N(R^{C})(R^{D}), —C(O)N(R^{C})(R^{D}), —N(R^{C})C(O)R^{A}, S(O)ₓR^{E}, —S(O)ₓN(R^{C})(R^{D}), —N(R^{C})S(O)ₓR^{E}, carbocyclyl, heterocyclyl, aryl, or heteroaryl, wherein each alkyl, alkenyl, alkynyl, carbocyclyl, heterocyclyl, aryl, and heteroaryl is independently and optionally substituted with one or more R⁷;
[0838] each of R^{A}, R^{B}, R^{C}, R^{D}, and R^{E} is independently hydrogen or C₁-C₆ alkyl;
[0839] each R⁶ is independently C₁-C₆ alkyl, oxo, cyano, —OR^{B}, —N(R^{C})(R^{D}), —C(O)N(R^{C})(R^{D}), —N(R^{C})C(O)R^{A}, aryl, or heteroaryl, wherein each aryl and heteroaryl is independently and optionally substituted with one or more R⁸.
[0840] each R⁷ is independently halo, oxo, cyano, —OR^{B}, —N(R^{C})(R^{D}), —C(O)N(R^{C})(R^{D}), or —N(R^{C})C(O)R^{A};
[0841] each R⁸ is independently C₁-C₆ alkyl, cyano, —OR^{B}, —N(R^{C})(R^{D}), —C(O)N(R^{C})(R^{D}), or —N(R^{C})C(O)R^{A};
[0842] n is 0, 1, 2, or 3;
[0843] o is 0, 1, 2, 3, 4, or 5; and
[0844] x is 0, 1, or 2.

[0845] In some embodiments, X is O.

[0846] In some embodiments, M is C₁-C₆ alkyl, C₂-C₆ alkenyl, C₂-C₆ alkynyl, or C₁-C₆ heteroalkyl, wherein each alkyl, alkenyl, alkynyl, and heteroalkyl is independently and optionally substituted with 1-6 R⁴ (e.g., 1 R⁴, 2 R⁴, 3 R⁴, 4 R⁴, 5 R⁴, or 6 R⁴). In some embodiments, M is absent.

[0847] In some embodiments, Ring A is carbocyclyl, heterocyclyl, aryl, or heteroaryl, each of which is independently and optionally substituted with 1-6 R⁴ (e.g., 1 R⁴, 2 R⁴, 3 R⁴, 4 R⁴, 5 R⁴, or 6 R⁴). In some embodiments, Ring A is heterocyclyl. In some embodiments, Ring A is heterocyclyl, e.g., a 6-membered heterocyclyl or a 5-membered heterocyclyl. In some embodiments, Ring A is a nitrogen-containing heterocyclyl. In some embodiments, Ring A is piperidinyl (e.g., piperidine-2,6-dionyl).

[0848] In some embodiments, M is absent and Ring A is heterocyclyl (e.g., piperidinyl, e.g., piperidine-2,6-dionyl).

[0849] In some embodiments, each of R^{2a} and R^{2b} is independently hydrogen. In some embodiments, R^{2a} and R^{2b} together with the carbon to which they are attached form a carbonyl group.

[0850] In some embodiments, R^{3a} is hydrogen, C₁-C₆ alkyl, C₂-C₆ alkenyl, C₂-C₆ alkynyl, C₁-C₆ heteroalkyl, halo, cyano, —C(O)R^{A}, —C(O)OR^{B}, —OR^{B}, —N(R^{C})(R^{D}), —C(O)N(R^{C})(R^{D}), —N(R^{C})C(O)R^{A}, —S(O)ₓR^{E}, —S(O)ₓN(R^{C})(R^{D}), or —N(R^{C})S(O)ₓR^{E}, wherein each alkyl, alkenyl, alkynyl, and heteroalkyl is independently and optionally substituted with 1-12 R⁶ (e.g., 1 R⁶, 2 R⁶, 3 R⁶, 4 R⁶, 5 R⁶, 6 R⁶, 7 R⁶, 8 R⁶, 9 R⁶, 10 R⁶, 11 R⁶, or 12 R⁶). In some embodiments, R^{3a} is hydrogen, —N(R^{C})(R^{D}) or —N(R^{C})C(O)R^{A}. In some embodiments, R^{3a} is hydrogen. In some embodiments, R^{3a} is —N(R^{C})(R^{D}) (e.g., —NH₂). In some embodiments, R^{3a} is —N(R^{C})C(O)R^{A} (e.g., NHC(O)CH₃).

[0851] In some embodiments, each R³ is independently C₁-C₆ alkyl, C₂-C₆ alkenyl, C₂-C₆ alkynyl, C₁-C₆ heteroalkyl, halo, cyano, —C(O)R^{A}, —C(O)OR^{B}, —OR^{B}, —N(R^{C})(R^{D}), —C(O)N(R^{C})(R^{D}), —N(R^{C})C(O)R^{A}, —S(O)ₓR^{E}, —S(O)ₓN(R^{C})(R^{D}), or —N(R^{C})S(O)ₓR^{E}, wherein each alkyl, alkenyl, alkynyl, and heteroalkyl is independently and optionally substituted with 1-12 R⁶ (e.g., 1 R⁶, 2 R⁶, 3 R⁶, 4 R⁶, 5 R⁶, 6 R⁶, 7 R⁶, 8 R⁶, 9 R⁶, 10 R⁶, 11 R⁶, or 12 R⁶). In some embodiments, R³ is C₁-C₆ heteroalkyl (e.g., CH₂NHC(O)CH₂-phenyl-t-butyl).

[0852] In some embodiments, each R⁴ is independently C₁-C₆ alkyl, C₂-C₆ alkenyl, C₂-C₆ alkynyl, C₁-C₆ heteroalkyl, halo, cyano, oxo, —C(O)R^{A}, —C(O)OR^{B}, —OR^{B}, —N(R^{C})(R^{D}), —C(O)N(R^{C})(R^{D}), —N(R^{C})C(O)R^{A}, S(O)_{X}R^{E}, —S(O)ₓN(R^{C})(R^{D}), —N(R^{C})S(O)ₓR^{E}, carbocyclyl, heterocyclyl, aryl, or heteroaryl, wherein each alkyl, alkenyl, alkynyl, carbocyclyl, heterocyclyl, aryl, and heteroaryl is independently and optionally substituted with 1-12 R⁷ (e.g., 1 R⁷, 2 R⁷, 3 R⁷, 4 R⁷, 5 R⁷, 6 R⁷, 7 R⁷, 8 R⁷, 9 R⁷, 10 R⁷, 11 R⁷, or 12 R⁷).

[0853] In some embodiments, each R⁶ is independently C₁-C₆ alkyl, oxo, cyano, —OR^{B}, —N(R^{C})(R^{D}), —C(O)N(R^{C})(R^{D}), —N(R^{C})C(O)R^{A}, aryl, or heteroaryl, wherein each aryl and heteroaryl is independently and optionally substituted with 1-6 R⁸ (e.g., 1 R⁸, 2 R⁸, 3 R⁸, 4 R⁸, 5 R⁸, or 6 R⁸).

[0854] In some embodiments, n is 0 or 1. In some embodiments, n is 0. In some embodiments, n is 1.

[0855] In some embodiments, the degradation compound is a compound of Formula (III):

[chemical structure]

or a pharmaceutically acceptable salt, ester, hydrate, or tautomer thereof, wherein:
[0856] X₁ is CR₃;
[0857] [symbol] is optionally a double bond when X₁ is CR₃ and R₃ is absent;
[0858] each R₁ is independently C₁-C₆ alkyl, C₁-C₆ haloalkyl, C₁-C₆ hydroxyalkyl, or halo, or
[0859] two R₁ together with the carbon atoms to which they are attached form a 5- or 6-membered heterocyclyl ring, or
[0860] two R₁, when on adjacent atoms, together with the atoms to which they are attached form a C₆-C₁₀ aryl or 5- or 6-membered heteroaryl ring comprising 1 to 3 heteroatoms selected from O, N, and S; R₂ is hydrogen, C₁-C₆ alkyl, —C(O)C₁-C₆ alkyl, —C(O)(CH₂)₀₋₃—C₆-C₁₀ aryl, —C(O)O(CH₂)₀₋₃—C₆-C₁₀ aryl, C₆-C₁₀ aryl, or 5- or 6-membered heteroaryl comprising 1 to 3 heteroatoms selected from O, N, and S, C₃-C₈ carbocyclyl, or 5- to 7-heterocyclyl comprising 1 to 3 heteroatoms selected from O, N, and S, wherein the alkyl is optionally substituted with one or more R₄; and the aryl, heteroaryl, carbocyclyl, and heterocyclyl are optionally substituted with one or more R₅, or
[0861] R₁ and R₂, when on adjacent atoms, together with the atoms to which they are attached form a 5- or 6-membered heterocyclyl ring;
[0862] R₃ is hydrogen, or R₃ is absent when [symbol] is a double bond;
[0863] each R₄ is independently selected from —C(O)OR₆, —C(O)NR₆R_{6′}, —NR₆C(O)R_{6′}, halo, —OH, —NH₂, cyano, C₆-C₁₀ aryl, 5- or 6-membered heteroaryl comprising 1 to 4 heteroatoms selected from O, N, and S, C₃-C₈ carbocyclyl, and 5- to 7-membered heterocyclyl ring comprising 1 to 3 heteroatoms selected from O, N, and S, wherein the aryl, heteroaryl, carbocyclyl, and heterocyclyl are optionally substituted with one or more R₇;
[0864] each R₅ is independently selected from C₁-C₆ alkyl, C₂-C₆ alkenyl, C₂-C₆ alkynyl, C₁-C₆ alkoxy, C₁-C₆ haloalkyl, C₁-C₆ haloalkoxy, C₁-C₆ hydroxyalkyl, halo, —OH, —NH₂, cyano, C₃-C₇ carbocyclyl, 5- to 7-membered heterocyclyl comprising 1 to 3 heteroatoms selected from O, N, and S, C₆-C₁₀ aryl, and 5- or 6-membered heteroaryl comprising 1 to 3 heteroatoms selected from O, N, and S, or
[0865] two R₅, when on adjacent atoms, together with the atoms to which they are attached form a C₆-C₁₀ aryl or 5- or 6-membered heteroaryl comprising 1 to 3 heteroatoms selected from O, N, and S, optionally substituted with one or more R₁₀, or
[0866] two R₅, when on adjacent atoms, together with the atoms to which they are attached form a C₅-C₇ carbocyclyl or 5- to 7-membered heterocyclyl comprising 1 to 3 heteroatoms selected from O, N, and S optionally substituted with one or more R₁₀;
[0867] R₆ and R_{6′} are each independently hydrogen, C₁-C₆ alkyl, or C₆-C₁₀ aryl;
[0868] each R₇ is independently selected from C₁-C₆ alkyl, C₂-C₆ alkenyl, C₂-C₆ alkynyl, C₁-C₆ alkoxy, C₁-C₆ haloalkyl, C₁-C₆ haloalkoxy, —C(O)R₈, —(CH₂)₀₋₃C(O)OR₈, —C(O)NR₈R₉, —NR₈C(O)R₉, —NR₈C(O)OR₉, —S(O)ₚNR₈R₉, —S(O)ₚR₁₂, (C₁-C₆)hydroxyalkyl, halo, —OH, —O(CH₂)₁₋₃CN, —NH₂, cyano, —O(CH₂)₀₋₃— C₆-C₁₀ aryl, adamantyl, —O(CH₂)₀₋₃-5- or 6-membered heteroaryl comprising 1 to 3 heteroatoms selected from O, N, and S, C₆-C₁₀ aryl, monocyclic or bicyclic 5- to 10-membered heteroaryl comprising 1 to 3 heteroatoms selected from O, N, and S, C₃-C₇ carbocyclyl, and 5- to 7-membered heterocyclyl comprising 1 to 3 heteroatoms selected from O, N, and S, wherein the alkyl is optionally substituted with one or more R₁, and the aryl, heteroaryl, and heterocyclyl are optionally substituted with one or more substituents each independently selected from halogen, C₁-C₆ alkyl, C₁-C₆ haloalkyl, and C₁-C₆ alkoxy, or
[0869] two R₇ together with the carbon atom to which they are attached form a ═(O), or
[0870] two R₇, when on adjacent atoms, together with the atoms to which they are attached form a C₆-C₁₀ aryl or 5- or 6-membered heteroaryl comprising 1 to 3 heteroatoms selected from O, N, and S, optionally substituted with one or more R₁₀, or
[0871] two R₇ together with the atoms to which they are attached form a C₅-C₇ carbocyclyl or a 5- to 7-membered heterocyclyl comprising 1 to 3 heteroatoms selected from O, N, and S, optionally substituted with one or more R₁₀;
[0872] R₇ and R₉ are each independently hydrogen or C₁-C₆ alkyl;
[0873] each R₁₀ is independently selected from C₁-C₆ alkyl, C₁-C₆ alkoxy, C₁-C₆ haloalkyl, C₁-C₆ haloalkoxy, C₁-C₆ hydroxyalkyl, halo, —OH, —NH₂, and cyano, or
[0874] two R₁₀ together with the carbon atom to which they are attached form a ═(O);
[0875] each R₁₁ is independently selected from cyano, C₁-C₆ alkoxy, C₆-C₁₀ aryl, and 5- to 7-membered heterocyclyl comprising 1 to 3 heteroatoms selected from O, N, and S, wherein each aryl and heterocyclyl is optionally substituted with one or more substituents each independently selected from C₁-C₆ alkyl, C₁-C₆ alkoxy, C₁-C₆ haloalkyl, C₁-C₆ haloalkoxy, C₁-C₆ hydroxyalkyl, halo, —OH, —NH₂, and cyano;
[0876] R₁₂ is C₁-C₆ alkyl, C₁-C₆ haloalkyl, C₆-C₁₀ aryl, or 5- to 7-membered heterocyclyl comprising 1 to 3 heteroatoms selected from O, N, and S;
[0877] Rₓ is hydrogen or deuterium;
[0878] p is 0, 1, or 2;
[0879] n is 0, 1, or 2;
[0880] y is 1 or 2, wherein n+y≤3; and
[0881] q is 0, 1, 2, 3, or 4.

[0882] In some embodiments, the degradation compound of Formula (III) is a compound of Formula

[chemical structure]

or a pharmaceutically acceptable salt, ester, hydrate, or tautomer thereof, wherein:
[0883] X₁ is CR₃;
[0884] [symbol] is optionally a double bond when X₁ is CR₃ and R₃ is absent;
[0885] each R₁ is independently C₁-C₆ alkyl, C₁-C₆ haloalkyl, C₁-C₆ hydroxyalkyl, or halo; R₂ is hydrogen, C₁-C₆ alkyl, C₆-C₁₀ aryl, or 5- or 6-membered heteroaryl comprising 1 to 3 heteroatoms selected from O, N, and S, C₃-C₈ carbocyclyl, or 5- to 7-membered heterocyclyl comprising 1 to 3 heteroatoms selected from O, N, and S, wherein the alkyl is optionally substituted with one or more R₄; and the aryl, heteroaryl, carbocyclyl, and heterocyclyl are optionally substituted with one or more R₅;
[0886] R₃ is hydrogen, or R₃ is absent when [symbol] is a double bond;
[0887] each R₄ is independently selected from —C(O)OR₆, —C(O)NR₆R_{6′}, —NR₆C(O)R_{6′}, C₆-C₁₀ aryl, 5- or 6-membered heteroaryl comprising 1 to 4 heteroatoms selected from O, N, and S, C₃-C₈ carbocyclyl, and 5- to 7-membered heterocyclyl ring comprising 1 to 3 heteroatoms selected from O, N, and S, wherein the aryl, heteroaryl, carbocyclyl, and heterocyclyl are optionally substituted with one or more R₇;
[0888] each R₅ is independently selected from C₁-C₆ alkyl, C₂-C₆ alkenyl, C₂-C₆ alkynyl, C₁-C₆ alkoxy, C₁-C₆ haloalkyl, C₁-C₆ haloalkoxy, C₁-C₆ hydroxyalkyl, halo, —OH, —NH₂, cyano, C₃-C₇ carbocyclyl, 5- to 7-membered heterocyclyl comprising 1 to 3 heteroatoms selected from O, N, and S, C₆-C₁₀ aryl, and 5- or 6-membered heteroaryl comprising 1 to 3 heteroatoms selected from O, N, and S, or
[0889] two R₅, when on adjacent atoms, together with the atoms to which they are attached form a C₆-C₁₀ aryl or 5- or 6-membered heteroaryl comprising 1 to 3 heteroatoms selected from O, N, and S, optionally substituted with one or more R₁₀, or
[0890] two R₅, when on adjacent atoms, together with the atoms to which they are attached form a C₅-C₇ carbocyclyl or 5- to 7-membered heterocyclyl comprising 1 to 3 heteroatoms selected from O, N, and S optionally substituted with one or more R₁₀;
[0891] R₆ and R_{6′} are each independently hydrogen, or C₁-C₆ alkyl;
[0892] each R₇ is independently selected from C₁-C₆ alkyl, C₂-C₆ alkenyl, C₂-C₆ alkynyl, C₁-C₆ alkoxy, C₁-C₆ haloalkyl, C₁-C₆ haloalkoxy, —C(O)R₈, —C(O)NR₈R₉, —NR₈C(O)R₉, —NR₈C(O)OR₉, (C₁-C₆)hydroxyalkyl, halo, —OH, —NH₂, cyano, C₆-C₁₀ aryl, 5- or 6-membered heteroaryl comprising 1 to 3 heteroatoms selected from O, N, and S, C₃-C₇ carbocyclyl, and 5- to 7-membered heterocyclyl comprising 1 to 3 heteroatoms selected from O, N, and S, or
[0893] two R₇, when on adjacent atoms, together with the atoms to which they are attached form a C₆-C₁₀ aryl or a 5- or 6-membered heteroaryl comprising 1 to 3 heteroatoms selected from O, N, and S, optionally substituted with one or more R₁₀, or
[0894] two R₇ together with the atoms to which they are attached form a C₅-C₇ carbocyclyl or a 5- to 7-membered heterocyclyl comprising 1 to 3 heteroatoms selected from O, N, and S, optionally substituted with one or more R₁₀;
[0895] R₈ and R₉ are each independently hydrogen or C₁-C₆ alkyl;
[0896] each R₁₀ is independently selected from C₁-C₆ alkyl, C₁-C₆ alkoxy, C₁-C₆ haloalkyl, C₁-C₆ haloalkoxy, C₁-C₆ hydroxyalkyl, halo, —OH, —NH₂, and cyano;
[0897] Rₓ is hydrogen or deuterium;
[0898] n is 1 or 2; and
[0899] q is 0, 1, 2, 3, or 4.

[0900] In an embodiment, the compound of Formula (III) is a compound of Formula (III-b):

[chemical structure]

or a pharmaceutically acceptable salt, hydrate, solvate, prodrug, stereoisomer, and tautomer thereof, wherein X₁, R₁, R₂, n, q, and subvariables thereof are defined as described for Formula (III).

[0901] In an embodiment, the compound of Formula (III) is a compound of Formula (III-c):

[chemical structure]

or a pharmaceutically acceptable salt, hydrate, solvate, prodrug, stereoisomer, and tautomer thereof, wherein R₁, R₂, n, q, and subvariables thereof are defined as described for Formula (III).

[0902] In an embodiment, the compound of Formula (III) is a compound of Formula (III-d):

[chemical structure]

or a pharmaceutically acceptable salt, hydrate, solvate, prodrug, stereoisomer, and tautomer thereof, wherein R₁, R₂, q, and subvariables thereof are defined as described for Formula (III).

[0903] In an embodiment, the compound of Formula (III) is a compound of Formula (III-e):

[chemical structure]

or a pharmaceutically acceptable salt, hydrate, solvate, prodrug, stereoisomer, and tautomer thereof, wherein R₁, R₂, q, and subvariables thereof are defined as described for Formula (III).

[0904] In some embodiments of Formula (III), X₁ is CH and n is 1. In another embodiment, X₁ is CH, n is 1, and q is 0.

[0905] In some embodiments of Formula (III), X₁ is CH, n is 1, and q is 0 or 1. In another embodiment, X₁ is CH, n is 1, q is 0 or 1, and R₁ is C₁-C₆ alkyl. In another embodiment, X₁ is CH, n is 1, q is 0 or 1, R₁ is C₁-C₆ alkyl, and R₂ is C₁-C₆ alkyl optionally substituted with one to three R₄. In another embodiment, X₁ is CH, n is 1, q is 0 or 1, R₁ is C₁-C₆ alkyl, and R₂ is C₁-C₆ alkyl substituted with one to three R₄.

[0906] In another embodiment, X₁ is CH, n is 1, q is 0, and R₂ is C₁-C₆ alkyl optionally substituted with one to three R₄. In another embodiment, X₁ is CH, n is 1, q is 0, and R₂ is C₁-C₆ alkyl substituted with one to three R₄.

[0907] In some embodiments of the formulae above, X₁ is CH, n is 1, q is 0 or 1, R¹ is C₁-C₆ alkyl, R₂ is C₁-C₆ alkyl optionally substituted with one to three R₄, and each R₄ is independently selected from —C(O)OR₆, C₆-C₁₀ aryl, 5- or 6-membered heteroaryl comprising 1 to 3 heteroatoms selected from O, N, and S, C₃-C₈ carbocyclyl, and 5- to 7-membered heterocyclyl comprising 1 to 3 heteroatoms selected from O, N, and S, wherein the aryl, heteroaryl, carbocyclyl, and heterocyclyl are optionally substituted with one to three R₇.

[0908] In some embodiments of Formula (III), X₁ is CH, n is 1, q is 0 or 1, R₁ is C₁-C₆ alkyl, R₂ is C₁-C₆ alkyl substituted with one to three R₄, and each R₄ is independently selected from —C(O)OR₆, C₆-C₁₀ aryl, 5- or 6-membered heteroaryl comprising 1 to 3 heteroatoms selected from O, N, and S, C₃-C₈ carbocyclyl, and 5- to 7-membered heterocyclyl comprising 1 to 3 heteroatoms selected from O, N, and S, wherein the aryl, heteroaryl, carbocyclyl, and heterocyclyl groups are optionally substituted with one to three R₇.

[0909] In some embodiments of Formula (III), X₁ is CH, n is 1, q is 0 or 1, R₁ is C₁-C₆ alkyl, R₂ is C₁-C₆ alkyl optionally substituted with one to three R₄, and each R₄ is independently selected from C₆-C₁₀ aryl, 5- or 6-membered heteroaryl comprising 1 to 3 heteroatoms selected from O, N, and S, C₃-C₈ carbocyclyl, and 5- to 7-membered heterocyclyl comprising 1 to 3 heteroatoms selected from O, N, and S, wherein the aryl, heteroaryl, carbocyclyl, and heterocyclyl groups are optionally substituted with one to three R₇.

[0910] In some embodiments of Formula (III), X₁ is CH, n is 1, q is 0 or 1, R₁ is C₁-C₆ alkyl, R₂ is C₁-C₆ alkyl substituted with one to three R₄, and each R₄ is independently selected from C₆-C₁₀ aryl, 5- or 6-membered heteroaryl comprising 1 to 3 heteroatoms selected from O, N, and S, C₃-C₈ carbocyclyl, and 5- to 7-membered heterocyclyl comprising 1 to 3 heteroatoms selected from O, N, and S, wherein the aryl, heteroaryl, carbocyclyl, and heterocyclyl groups are optionally substituted with one to three R₇.

[0911] In some embodiments of Formula (III), X₁ is CH, n is 1, q is 0, and R₂ is C₆-C₁₀ aryl, C₃-C₈ carbocyclyl, or 5- to 7-membered heterocyclyl comprising 1 to 3 heteroatoms selected from O, N, and S, wherein the aryl, carbocyclyl, and heterocyclyl are optionally substituted with one to three R₅. In yet another embodiment, X₁ is CH, n is 1, q is 0, and R₂ is C₆-C₁₀ aryl, C₃-C₈ carbocyclyl, or 5- to 7-membered heterocyclyl comprising 1 to 3 heteroatoms selected from O, N, and S.

[0912] In some embodiments of Formula (III), X₁ is CH, n is 1, q is 0, and R₂ is C₆-C₁₀ aryl optionally substituted with one to three R₅. In another embodiment, X₁ is CH, n is 1, q is 0, and R₂ is 5- or 6-membered heteroaryl comprising 1 to 3 heteroatoms selected from O, N, and S optionally substituted with one to three R₅. In yet another embodiment, X₁ is CH, n is 1, q is 0, and R₂ is C₃-C₈ carbocyclyl optionally substituted with one to three R₅. In another embodiment, X₁ is CH, n is 1, q is 0, and R₂ is 5- to 7-membered heterocyclyl comprising 1 to 3 heteroatoms selected from O, N, and S, optionally substituted with one to three R₅.

[0913] In some embodiments of Formula (III), X₁ is CH, n is 1, q is 0 or 1, R₁ is C₁-C₆ alkyl, and R₂ is C₆-C₁₀ aryl, C₃-C₈ carbocyclyl, or 5- to 7-membered heterocyclyl comprising 1 to 3 heteroatoms selected from O, N, and S, wherein the aryl, carbocyclyl, and heterocyclyl are optionally substituted with one to three R₅. In yet another embodiment, X₁ is CH, n is 1, q is 0 or 1, R₁ is C₁-C₆ alkyl, and R₂ is C₆-C₁₀ aryl, C₃-C₈ carbocyclyl, or 5- to 7-membered heterocyclyl comprising 1 to 3 heteroatoms selected from O, N, and S.

[0914] In some embodiments of Formula (III), X₁ is CH, n is 1, q is 0 or 1, R₁ is C₁-C₆ alkyl, and R₂ is C₆-C₁₀ aryl optionally substituted with one to three R₅. In another embodiment, X₁ is CH, n is 1, q is 0, and R₂ is 5- or 6-membered heteroaryl comprising 1 to 3 heteroatoms selected from O, N, and S optionally substituted with one to three R₅. In yet another embodiment, X₁ is CH, n is 1, q is 0 or 1, R₁ is C₁-C₆ alkyl, and R₂ is C₃-C₈ carbocyclyl optionally substituted with one to three R₅. In another embodiment, X₁ is CH, n is 1, q is 0 or 1, R₁ is C₁-C₆ alkyl, and R₂ is 5- to 7-membered heterocyclyl comprising 1 to 3 heteroatoms selected from O, N, and S, optionally substituted with one to three R₅.

[0915] In some embodiments of Formula (III), X₁ is CH, n is 1, q is 0, and R₂ is C₁-C₆ alkyl optionally substituted with one to three R₄. In another embodiment X₁ is CH, n is 1, q is 0, and R₂ is C₁-C₆ alkyl substituted with one to three R₄.

[0916] In some embodiments of Formula (III), X₁ is CH, n is 1, q is 0, R₂ is C₁-C₆ alkyl optionally substituted with one to three R₄, and each R₄ is independently selected from —C(O)OR₆, C₆-C₁₀ aryl, 5- or 6-membered heteroaryl comprising 1 to 3 heteroatoms selected from O, N, and S, C₃-C₈ carbocyclyl, and 5- to 7-membered heterocyclyl comprising 1 to 3 heteroatoms selected from O, N, and S, wherein the aryl, heteroaryl, carbocyclyl, and heterocyclyl groups are optionally substituted with one to three R₇.

[0917] In some embodiments of Formula (III), X₁ is CH, n is 1, q is 0, R₂ is C₁-C₆ alkyl substituted with one to three R₄, and each R₄ is independently selected from —C(O)OR₆, C₆-C₁₀ aryl, 5- or 6-membered heteroaryl comprising 1 to 3 heteroatoms selected from O, N, and S, C₃-C₈ carbocyclyl, and 5- to 7-membered heterocyclyl comprising 1 to 3 heteroatoms selected from O, N, and S, wherein the aryl, heteroaryl, carbocyclyl, and heterocyclyl groups are optionally substituted with one to three R₇.

[0918] In some embodiments of Formula (III), X₁ is CH, n is 1, q is 0, R₂ is C₁-C₆ alkyl optionally substituted with one to three R₄, and each R₄ is independently selected from halo, —OH, C₆-C₁₀ aryl, 5- or 6-membered heteroaryl comprising 1 to 3 heteroatoms selected from O, N, and S, C₃-C₈ carbocyclyl, and 5- to 7-membered heterocyclyl comprising 1 to 3 heteroatoms selected from O, N, and S, wherein the aryl, heteroaryl, carbocyclyl, and heterocyclyl groups are optionally substituted with one to three R₇.

[0919] In some embodiments of Formula (III), X₁ is CH, n is 1, q is 0, R₂ is C₁-C₆ alkyl substituted with one to three R₄, and each R₄ is independently selected from halo, —OH, C₆-C₁₀ aryl, 5- or 6-membered heteroaryl comprising 1 to 3 heteroatoms selected from O, N, and S, C₃-C₈ carbocyclyl, and 5- to 7-membered heterocyclyl comprising 1 to 3 heteroatoms selected from O, N, and S, wherein the aryl, heteroaryl, carbocyclyl, and heterocyclyl groups are optionally substituted with one to three R₇.

[0920] In some embodiments of the formulae above, X₁ is CH, n is 1, n1 is 1, q is 0, R₂ is C₁-C₆ alkyl optionally substituted with one to three R₄, and each R₄ is independently selected from halo, —OH, C₆-C₁₀ aryl, 5- or 6-membered heteroaryl comprising 1 to 3 heteroatoms selected from O, N, and S, C₃-C₈ carbocyclyl, and 5- to 7-membered heterocyclyl comprising 1 to 3 heteroatoms selected from O, N, and S, wherein the aryl, heteroaryl, carbocyclyl, and heterocyclyl groups are optionally substituted with one to three R₇.

[0921] In some embodiments of Formula (III), X₁ is CH, n is 1, n1 is 1, q is 0, R₂ is C₁-C₆ alkyl substituted with one to three R₄, and each R₄ is independently selected from halo, —OH, C₆-C₁₀ aryl, 5- or 6-membered heteroaryl comprising 1 to 3 heteroatoms selected from O, N, and S, C₃-C₈ carbocyclyl, and 5- to 7-membered heterocyclyl comprising 1 to 3 heteroatoms selected from O, N, and S, wherein the aryl, heteroaryl, carbocyclyl, and heterocyclyl groups are optionally substituted with one to three R₇.

[0922] In some embodiments of Formula (III), X₁ is CH, n is 1, q is 0, R₂ is C₁-C₆ alkyl optionally substituted with one to three R₄, and each R₄ is independently selected from C₆-C₁₀ aryl, 5- or 6-membered heteroaryl comprising 1 to 3 heteroatoms selected from O, N, and S, C₃-C₈ carbocyclyl, and 5- to 7-membered heterocyclyl comprising 1 to 3 heteroatoms selected from O, N, and S, wherein the aryl, heteroaryl, carbocyclyl, and heterocyclyl groups are optionally substituted with one to three R₇.

[0923] In some embodiments of Formula (III), X₁ is CH, n is 1, q is 0, R₂ is C₁-C₆ alkyl substituted with one to three R₄, and each R₄ is independently selected from C₆-C₁₀ aryl, 5- or 6-membered heteroaryl comprising 1 to 3 heteroatoms selected from O, N, and S, C₃-C₈ carbocyclyl, and 5- to 7-membered heterocyclyl comprising 1 to 3 heteroatoms selected from O, N, and S, wherein the aryl, heteroaryl, carbocyclyl, and heterocyclyl groups are optionally substituted with one to three R₇.

[0924] In some embodiments of Formula (III), X₁ is CH, n is 1, q is 0, R₂ is C₁-C₆ alkyl optionally substituted with one to three R₄, and each R₄ is independently selected from halo, —OH, phenyl, 5- or 6-membered heteroaryl comprising 1 to 3 heteroatoms selected from O, N, and S, C₃-C₈ carbocyclyl, and 5- to 7-membered heterocyclyl comprising 1 to 3 heteroatoms selected from O, N, and S, wherein the aryl, heteroaryl, carbocyclyl, and heterocyclyl groups are optionally substituted with one to three R₇.

[0925] In some embodiments of Formula (III), X₁ is CH, n is 1, q is 0, R₂ is C₁-C₆ alkyl substituted with one to three R₄, and each R₄ is independently selected from halo, —OH, phenyl, 5- or 6-membered heteroaryl comprising 1 to 3 heteroatoms selected from O, N, and S, C₃-C₈ carbocyclyl, and 5- to 7-membered heterocyclyl comprising 1 to 3 heteroatoms selected from O, N, and S, wherein the aryl, heteroaryl, carbocyclyl, and heterocyclyl groups are optionally substituted with one to three R₇.

[0926] In some embodiments of Formula (III), X₁ is CH, n is 1, n1 is 1, q is 0, R₂ is C₁-C₆ alkyl optionally substituted with one to three R₄, and each R₄ is independently selected from halo, —OH, phenyl, 5- or 6-membered heteroaryl comprising 1 to 3 heteroatoms selected from O, N, and S, C₃-C₈ carbocyclyl, and 5- to 7-membered heterocyclyl comprising 1 to 3 heteroatoms selected from O, N, and S, wherein the aryl, heteroaryl, carbocyclyl, and heterocyclyl groups are optionally substituted with one to three R₇.

[0927] In some embodiments of Formula (III), X₁ is CH, n is 1, n1 is 1, q is 0, R₂ is C₁-C₆ alkyl substituted with one to three R₄, and each R₄ is independently selected from halo, —OH, phenyl, 5- or 6-membered heteroaryl comprising 1 to 3 heteroatoms selected from O, N, and S, C₃-C₈ carbocyclyl, and 5- to 7-membered heterocyclyl comprising 1 to 3 heteroatoms selected from O, N, and S, wherein the phenyl, heteroaryl, carbocyclyl, and heterocyclyl groups are optionally substituted with one to three R₇.

[0928] In some embodiments of Formula (III), X₁ is CH, n is 1, q is 0, R₂ is C₁-C₆ alkyl optionally substituted with one to three R₄, and each R₄ is independently selected from phenyl, 5- or 6-membered heteroaryl comprising 1 to 3 heteroatoms selected from O, N, and S, C₃-C₈ carbocyclyl, and 5- to 7-membered heterocyclyl comprising 1 to 3 heteroatoms selected from O, N, and S, wherein the phenyl, heteroaryl, carbocyclyl, and heterocyclyl groups are optionally substituted with one to three R₇.

[0929] In some embodiments of Formula (III), X₁ is CH, n is 1, q is 0, R₂ is C₁-C₆ alkyl substituted with one to three R₄, and each R₄ is independently selected from phenyl, 5- or 6-membered heteroaryl comprising 1 to 3 heteroatoms selected from O, N, and S, C₃-C₈ carbocyclyl, and 5- to 7-membered heterocyclyl comprising 1 to 3 heteroatoms selected from O, N, and S, wherein the phenyl, heteroaryl, carbocyclyl, and heterocyclyl groups are optionally substituted with one to three R₇.

[0930] In some embodiments of Formula (III), X₁ is CH, n is 1, n1 is 1, q is 0, R₂ is C₁-C₆ alkyl optionally substituted with one to three R₄, and each R₄ is independently selected from phenyl, 5- or 6-membered heteroaryl comprising 1 to 3 heteroatoms selected from O, N, and S, C₃-C₈ carbocyclyl, and 5- to 7-membered heterocyclyl comprising 1 to 3 heteroatoms selected from O, N, and S, wherein the phenyl, heteroaryl, carbocyclyl, and heterocyclyl groups are optionally substituted with one to three R₇.

[0931] In some embodiments of Formula (III), X₁ is CH, n is 1, n1 is 1, q is 0, R₂ is C₁-C₆ alkyl substituted with one to three R₄, and each R₄ is independently selected from phenyl, 5- or 6-membered heteroaryl comprising 1 to 3 heteroatoms selected from O, N, and S, C₃-C₈ carbocyclyl, and 5- to 7-membered heterocyclyl comprising 1 to 3 heteroatoms selected from O, N, and S, wherein the phenyl, heteroaryl, carbocyclyl, and heterocyclyl groups are optionally substituted with one to three R₇.

[0932] In some embodiments of Formula (III), X₁ is CH, n is 1, q is 0, R₂ is C₁-C₆ alkyl optionally substituted with one to three R₄, and each R₄ is independently selected from phenyl and 5- or 6-membered heteroaryl comprising 1 to 3 heteroatoms selected from O, N, and S, wherein the phenyl and heteroaryl groups are optionally substituted with one to three R₇.

[0933] In some embodiments of Formula (III), X₁ is CH, n is 1, q is 0, R₂ is C₁-C₆ alkyl substituted with one to three R₄, and each R₄ is independently selected from phenyl and 5- or 6-membered heteroaryl comprising 1 to 3 heteroatoms selected from O, N, and S, C₃-C₈ carbocyclyl, and 5- to 7-membered heterocyclyl comprising 1 to 3 heteroatoms selected from O, N, and S, wherein the phenyl and heteroaryl groups are optionally substituted with one to three R₇.

[0934] In some embodiments of Formula (III), X₁ is CH, n is 1, n1 is 1, q is 0, R₂ is C₁-C₆ alkyl optionally substituted with one to three R₄, and each R₄ is independently selected from phenyl and 5- or 6-membered heteroaryl comprising 1 to 3 heteroatoms selected from O, N, and S, wherein the phenyl and heteroaryl groups are optionally substituted with one to three R₇.

[0935] In some embodiments of Formula (III), X₁ is CH, n is 1, n1 is 1, q is 0, R₂ is C₁-C₆ alkyl substituted with one to three R₄, and each R₄ is independently selected from phenyl and 5- or 6-membered heteroaryl comprising 1 to 3 heteroatoms selected from O, N, and S, C₃-C₈ carbocyclyl, and 5- to 7-membered heterocyclyl comprising 1 to 3 heteroatoms selected from O, N, and S, wherein the phenyl and heteroaryl groups are optionally substituted with one to three R₇.

[0936] In some embodiments of Formula (III), X₁ is CH, n is 1, q is 0, R₂ is C₁-C₆ alkyl optionally substituted with one to three R₄, and each R₄ is phenyl optionally substituted with one to three R₇.

[0937] In some embodiments of Formula (III), X₁ is CH, n is 1, q is 0, R₂ is C₁-C₆ alkyl substituted with one to three R₄, and each R₄ is phenyl optionally substituted with one to three R₇.

[0938] In some embodiments of Formula (III), X₁ is CH, n is 1, n1 is 1, q is 0, R₂ is C₁-C₆ alkyl optionally substituted with one to three R₄, and each R₄ is phenyl optionally substituted with one to three R₇.

[0939] In some embodiments of Formula (III), X₁ is CH, n is 1, n1 is 1, q is 0, R₂ is C₁-C₆ alkyl substituted with one to three R₄, and each R₄ is phenyl optionally substituted with one to three R₇.

[0940] In some embodiments of Formula (III), X₁ is CH and n is 2. In another embodiment, X₁ is CH, n is 2, and q is 0. In yet another embodiment, X₁ is CH, n is 2, and q is 0 or 1. In another embodiment, X₁ is CH, n is 2, q is 0 or 1, and R₁ is C₁-C₆ alkyl.

[0941] In some embodiments of Formula (III), X₁ is CH, n is 2, q is 0 or 1, R₁ is C₁-C₆ alkyl, and R₂ is C₁-C₆ alkyl optionally substituted with one to three R₄. In another embodiment, X₁ is CH, n is 2, q is 0 or 1, R₁ is C₁-C₆ alkyl, and R₂ is C₁-C₆ alkyl substituted with one to three R₄.

[0942] In some embodiments of Formula (III), X₁ is CH, n is 2, q is 0, and R₂ is C₁-C₆ alkyl optionally substituted with one to three R₄. In another embodiment, X₁ is CH, n is 2, q is 0, and R₂ is C₁-C₆ alkyl substituted with one to three R₄.

[0943] In some embodiments of Formula (III), X₁ is CH, n is 2, q is 0 or 1, R₁ is C₁-C₆ alkyl, R₂ is C₁-C₆ alkyl optionally substituted with one to three R₄, and each R₄ is independently selected from —C(O)OR₆, C₆-C₁₀ aryl, 5- or 6-membered heteroaryl comprising 1 to 3 heteroatoms selected from O, N, and S, C₃-C₈ carbocyclyl, and 5- to 7-membered heterocyclyl comprising 1 to 3 heteroatoms selected from O, N, and S, wherein the aryl, heteroaryl, carbocyclyl, and heterocyclyl groups are optionally substituted with one to three R₇.

[0944] In some embodiments of Formula (III), X₁ is CH, n is 2, q is 0 or 1, R₁ is C₁-C₆ alkyl, R₂ is C₁-C₆ alkyl substituted with one to three R₄, and each R₄ is independently selected from —C(O)OR₆, C₆-C₁₀ aryl, 5- or 6-membered heteroaryl comprising 1 to 3 heteroatoms selected from O, N, and S, C₃-C₈ carbocyclyl, and 5- to 7-membered heterocyclyl comprising 1 to 3 heteroatoms selected from O, N, and S, wherein the aryl, heteroaryl, carbocyclyl, and heterocyclyl groups are optionally substituted with one to three R₇.

[0945] In some embodiments of Formula (III), X₁ is CH, n is 2, q is 0 or 1, R₁ is C₁-C₆ alkyl, R₂ is C₁-C₆ alkyl optionally substituted with one to three R₄, and each R₄ is independently selected from C₆-C₁₀ aryl, 5- or 6-membered heteroaryl comprising 1 to 3 heteroatoms selected from O, N, and S, C₃-C₈ carbocyclyl, and 5- to 7-membered heterocyclyl comprising 1 to 3 heteroatoms selected from O, N, and S, wherein the aryl, heteroaryl, carbocyclyl, and heterocyclyl groups are optionally substituted with one to three R₇.

[0946] In some embodiments of Formula (III), X₁ is CH, n is 2, q is 0 or 1, R₁ is C₁-C₆ alkyl, R₂ is C₁-C₆ alkyl substituted with one to three R₄, and each R₄ is independently selected from C₆-C₁₀ aryl, 5- or 6-membered heteroaryl comprising 1 to 3 heteroatoms selected from O, N, and S, C₃-C₈ carbocyclyl, and 5- to 7-membered heterocyclyl comprising 1 to 3 heteroatoms selected from O, N, and S, wherein the aryl, heteroaryl, carbocyclyl, and heterocyclyl groups are optionally substituted with one to three R₇.

[0947] In some embodiments of Formula (III), X₁ is CH, n is 2, q is 0, and R₂ is C₆-C₁₀ aryl, C₃-C₈ carbocyclyl, or 5- to 7-membered heterocyclyl comprising 1 to 3 heteroatoms selected from O, N, and S, wherein the aryl, carbocyclyl, and heterocyclyl are optionally substituted with one to three R₅. In yet another embodiment, X₁ is CH, n is 2, q is 0, and R₂ is C₆-C₁₀ aryl, C₃-C₈ carbocyclyl, or 5- to 7-membered heterocyclyl comprising 1 to 3 heteroatoms selected from O, N, and S.

[0948] In some embodiments of Formula (III), X₁ is CH, n is 2, q is 0, and R₂ is C₆-C₁₀ aryl optionally substituted with one to three R₅. In another embodiment, X₁ is CH, n is 2, q is 0, and R₂ is 5- or 6-membered heteroaryl comprising 1 to 3 heteroatoms selected from O, N, and S optionally substituted with one to three R₅. In yet another embodiment, X₁ is CH, n is 2, q is 0, and R₂ is C₃-C₈ carbocyclyl optionally substituted with one to three R₅. In another embodiment, X₁ is CH, n is 2, q is 0, and R₂ is 5- to 7-membered heterocyclyl comprising 1 to 3 heteroatoms selected from O, N, and S, optionally substituted with one to three R₅.

[0949] In some embodiments of Formula (III), X₁ is CH, n is 2, q is 0 or 1, R₁ is C₁-C₆ alkyl, and R₂ is C₆-C₁₀ aryl, C₃-C₈ carbocyclyl, or 5- to 7-membered heterocyclyl comprising 1 to 3 heteroatoms selected from O, N, and S, wherein the aryl, carbocyclyl, and heterocyclyl are optionally substituted with one to three R₅. In yet another embodiment, X₁ is CH, n is 2, q is 0 or 1, R₁ is C₁-C₆ alkyl, and R₂ is C₆-C₁₀ aryl, C₃-C₈ carbocyclyl, or 5- to 7-membered heterocyclyl comprising 1 to 3 heteroatoms selected from O, N, and S.

[0950] In some embodiments of Formula (III), X₁ is CH, n is 2, q is 0 or 1, R₁ is C₁-C₆ alkyl, and R₂ is C₆-C₁₀ aryl optionally substituted with one to three R₅. In another embodiment, X₁ is CH, n is 2, q is 0, and R₂ is 5- or 6-membered heteroaryl comprising 1 to 3 heteroatoms selected from O, N, and S optionally substituted with one to three R₅. In yet another embodiment, X₁ is CH, n is 2, q is 0 or 1, R₁ is C₁-C₆ alkyl, and R₂ is C₃-C₈ carbocyclyl optionally substituted with one to three R₅. In another embodiment, X₁ is CH, n is 2, q is 0 or 1, R₁ is C₁-C₆ alkyl, and R₂ is 5- to 7-membered heterocyclyl comprising 1 to 3 heteroatoms selected from O, N, and S, optionally substituted with one to three R₅.

[0951] In some embodiments of Formula (III), n is

[chemical structure]

[chemical structure]

[0952] In some embodiments of Formula (III),

[chemical structure]

[0953] In some embodiments of Formula (III),

[chemical structure]

[0954] A degradation compound may comprise one or more chiral centers or exist as one or more stereoisomers. In some embodiments, the degradation compound comprises a single chiral center and is a mixture of stereoisomers, e.g., an R stereoisomer and an S stereoisomer. In some embodiments, the mixture comprises a ratio of R stereoisomers to S stereoisomers, for example, about a 1:1 ratio of R stereoisomers to S stereoisomers (i.e., a racemic mixture). In some embodiments, the mixture comprises a ratio of R stereoisomers to S stereoisomers of about 51:49, about 52:48, about 53:47, about 54:46, about 55:45, about 60:40, about 65:35, about 70:30, about 75:25, about 80:20, about 85:15, about 90:10, about 95:5, or about 99:1. In some embodiments, the mixture comprises a ratio of S stereoisomers to R stereoisomers of about 51:49, about 52:48, about 53:47, about 54:46, about 55:45, about 60:40, about 65:35, about 70:30, about 75:25, about 80:20, about 85:15, about 90:10, about 95:5, or about 99:1. In some embodiments, the degradation compound is a single stereoisomer of Formula (I) or Formula (I-a), e.g., a single R stereoisomer or a single S stereoisomer.

[0955] In some embodiments, the degradation compound (e.g., a compound of Formulas (I), (I-a), (III), (III-a), (III-b), (III-c), (III-d), or (III-e)) is not attached to a linker or attachment group. In some embodiments, the degradation compound (e.g., a compound of Formulas (I), (I-a), (III), (III-a), (III-b), (III-c), (III-d), or (III-e)) does not comprise another moiety, e.g., a ligand, a targeting agent, or a moiety capable of dimerization.

[0956] In an embodiment, the degradation compound is a compound of Formula (I) or a pharmaceutically acceptable salt thereof. In an embodiment, the degradation compound is a compound of Formula (I-a) or a pharmaceutically acceptable salt thereof. In an embodiment, the degradation compound is a compound of Formula (III) or a pharmaceutically acceptable salt thereof. In an embodiment, the degradation compound is a compound of Formula (III-a) or a pharmaceutically acceptable salt thereof. In an embodiment, the degradation compound is a compound of Formula (II-b) or a pharmaceutically acceptable salt thereof. In an embodiment, the degradation compound is a compound of Formula (III-c) or a pharmaceutically acceptable salt thereof. In an embodiment, the degradation compound is a compound of Formula (III-d) or a pharmaceutically acceptable salt thereof. In an embodiment, the degradation compound is a compound of Formula (III-e) or a pharmaceutically acceptable salt thereof.

[0957] Exemplary degradation compounds of the disclosure (e.g., a compound of Formula (III), (In-a), (III-b), (III-c), (III-d), or (III-e) or a pharmaceutically acceptable salt thereof) include those in Table 29.

TABLE 29
Exemplary degradation compounds

| Cmpd | | |
|---|---|---|
| No. | Structure | Compound Name |
| I-1 | [chemical structure] | 3-(5-(1-ethylpiperidin- 4-yl)-1-oxoisoindolin- 2-yl)piperidine-2,6- dione |
| I-2 | [chemical structure] | 3-(1-oxo-5-(1-propyl- piperidin-4-yl) isoindolin-2-yl) piperidine-2,6-dione |
| I-3 | [chemical structure] | 3-(5-(1- (cyclopropylmethyl) piperidin-4-yl)-1- oxoisoindolin-2-yl) piperidine-2,6-dione |
| I-4 | [chemical structure] | 3-(5-(1-isobutyl- piperidin-4-yl)-1- oxoisoindolin-2-yl) piperidine-2,6-dione |
| I-5 | [chemical structure] | 3-(5-(1- (cyclobutylmethyl) piperidin-4-yl)-1- oxoisoindolin-2-yl) piperidine-2,6-dione |
| I-6 | [chemical structure] | 3-(5-(1-(oxazol-2- ylmethyl)piperidin- 4-yl)-1-oxoisoin- dolin-2-yl) piperidine-2,6-dione |
| I-7 | [chemical structure] | 3-(1-oxo-5-(1- (thiazol-2-ylmethyl) piperidin-4-yl) isoindolin-2-yl) piperidine-2,6-dione |
| I-8 | [chemical structure] | 3-(5-(1- (cyclopentylmethyl) piperidin-4-yl)-1- oxoisoindolin-2-yl) piperidine-2,6-dione |
| I-9 | [chemical structure] | 3-(5-(1-((5-chloro- thiophen-2-yl)methyl) piperidin-4-yl)-1- oxoisoindolin-2-yl) piperidine-2,6-dione |
| I-10 | [chemical structure] | 3-(5-(1-((2-chloro- thiazol-5-yl)methyl) piperidin-4-yl)-1- oxoisoindolin-2-yl) piperidine-2,6-dione |
| I-11 | [chemical structure] | 3-(5-(1- (cyclohexylmethyl) piperidin-4-yl)-1- oxoisoindolin-2-yl) piperidine-2,6-dione |
| I-12 | [chemical structure] | 3-(1-oxo-5-(1-(2- (pyrrolidin-1-yl) ethyl)piperidin-4- yl)isoindolin-2-yl) piperidine-2,6-dione |
| I-13 | [chemical structure] | 3-(1-oxo-5-(1-((tetra- hydro-2H-pyran-4- yl)methyl)piperidin- 4-yl)isoindolin-2-yl) piperidine-2,6-dione |
| I-14 | [chemical structure] | 3-(1-oxo-5-(1- phenethylpiperidin- 4-yl)isoindolin-2- yl)piperidine-2,6- dione |
| I-15 | [chemical structure] | 3-(5-(1-(3- fluorobenzyl) piperidin-4-yl)-1- oxoisoindolin-2-yl) piperidine-2,6-dione |
| I-16 | [chemical structure] | 3-(5-(1-(3- chlorobenzyl) piperidin-4-yl)-1- oxoisoindolin-2-yl) piperidine-2,6-dione |
| I-17 | [chemical structure] | 3-(5-(1-(2- fluorobenzyl) piperidin-4-yl)-1- oxoisoindolin-2-yl) piperidine-2,6-dione |
| I-18 | [chemical structure] | 3-(5-(1-(2- chlorobenzyl) piperidin-4-yl)-1- oxoisoindolin-2-yl) piperidine-2,6-dione |
| I-19 | [chemical structure] | 3-(1-oxo-5-(1-(2- (piperidin-1-yl) ethyl)piperidin-4- yl)isoindolin-2- yl)piperidine-2,6- dione |
| I-20 | [chemical structure] | 3-(5-(1-((3,5- dimethylisoxazol- 4-yl)methyl) piperidin-4-yl)-1- oxoisoindolin-2-yl) piperidine-2,6-dione |
| I-21 | [chemical structure] | 3-(5-(1-((1,3- dimethyl-1H- pyrazol-5-yl)methyl) piperidin-4-yl)-1- oxoisoindolin-2-yl) piperidine-2,6-dione |
| I-22 | [chemical structure] | 3-(5-(1-((6-methyl- pyridin-2-yl)methyl) piperidin-4-yl)-1- oxoisoindolin-2-yl) piperidine-2,6-dione |
| I-23 | [chemical structure] | 3-(5-(1-(3- morpholinopropyl) piperidin-4-yl)-1- oxoisoindolin-2-yl) piperidine-2,6-dione |
| I-24 | [chemical structure] | 3-(5-(1-(2,6- difluorobenzyl) piperidin-4-yl)-1- oxoisoindolin-2-yl) piperidine-2,6-dione |
| I-25 | [chemical structure] | 3-(5-(1-(2,6- dichlorobenzyl) piperidin-4-yl)-1- oxoisoindolin-2-yl) piperidine-2,6-dione |
| I-26 | [chemical structure] | 3-(5-(1-(3,5- difluorobenzyl) piperidin-4-yl)-1- oxoisoindolin-2-yl) piperidine-2,6-dione |
| I-27 | [chemical structure] | 3-(5-(1-(3,5- dibromobenzyl) piperidin-4-yl)-1- oxoisoindolin-2-yl) piperidine-2,6-dione |
| I-28 | [chemical structure] | 3-(5-(1-(3-chloro-5- fluorobenzyl) piperidin-4-yl)-1- oxoisoindolin-2-yl) piperidine-2,6-dione |
| I-29 | [chemical structure] | 3-(5-(1-(2,5- difluorobenzyl) piperidin-4-yl)-1- oxoisoindolin-2-yl) piperidine-2,6-dione |
| I-30 | [chemical structure] | 3-(5-(1-(2,5- dichlorobenzyl) piperidin-4-yl)-1- oxoisoindolin-2-yl) piperidine-2,6-dione |
| I-31 | [chemical structure] | 4-((4-(2-(2,6-dioxo- piperidin-3-yl)-1- oxoisoindolin-5-yl) piperidin-1-yl) methyl)benzonitrile (or 3-(5-(1-(4- nitrilebenzyl) piperidin-4-yl)-1- oxoisoindolin-2-yl) piperidine-2,6-dione) |
| I-32 | [chemical structure] | 3-(5-(1-(4- (hydroxymethyl) benzyl)piperidin-4- yl)-1-oxoisoindolin- 2-yl)piperidine- 2,6-dione |
| I-33 | [chemical structure] | 3-(5-(1-(3,4- dichlorobenzyl) piperidin-4-yl)-1- oxoisoindolin-2-yl) piperidine-2,6-dione |
| I-34 | [chemical structure] | 3-(5-(1-(4-chloro-2- fluorobenzyl) piperidin-4-yl)-1- oxoisoindolin-2-yl) piperidine-2,6-dione |
| I-35 | [chemical structure] | 3-(5-(1-(2-chloro-4- fluorobenzyl) piperidin-4-yl)-1- oxoisoindolin-2-yl) piperidine-2,6-dione |
| I-36 | [chemical structure] | 3-((4-(2-(2,6- dioxopiperidin-3- yl)-1-oxoiso- indolin-5-yl) piperidin-1-yl) methyl)benzonitrile |
| I-37 | [chemical structure] | 3-(5-(1-(2,3- difluorobenzyl) piperidin-4-yl)-1- oxoisoindolin-2-yl) piperidine-2,6-dione |
| I-38 | [chemical structure] | 2-((4-(2-(2,6- dioxopiperidin-3- yl)-1-oxoiso- indolin-5-yl) piperidin-1-yl) methyl)benzonitrile |
| I-39 | [chemical structure] | 3-(5-(1-(4- methoxybenzyl) piperidin-4-yl)-1- oxoisoindolin-2- yl)piperidine-2,6- dione |
| I-40 | [chemical structure] | 3-(5-(1-(2,5- dimethylbenzyl) piperidin-4-yl)-1- oxoisoindolin-2-yl) piperidine-2,6-dione |
| I-41 | [chemical structure] | 3-(5-(1-(3,4- dimethylbenzyl) piperidin-4-yl)-1- oxoisoindolin-2-yl) piperidine-2,6-dione |
| I-42 | [chemical structure] | 3-(5-(1-(2,4- dimethylbenzyl) piperidin-4-yl)-1- oxoisoindolin-2-yl) piperidine-2,6-dione |
| I-43 | [chemical structure] | 3-(5-(1-((1H- indazol-4-yl) methyl)piperidin- 4-yl)-1- oxoisoindolin-2-yl) piperidine-2,6-dione |
| I-44 | [chemical structure] | 3-(5-(1-((1H- benzo[d]imidazol- 2-yl)methyl) piperidin-4-yl)-1- oxoisoindolin-2-yl) piperidine-2,6-dione |
| I-45 | [chemical structure] | 3-(5-(1-(4- isopropylbenzyl) piperidin-4-yl)-1- oxoisoindolin-2-yl) piperidine-2,6-dione |
| I-46 | [chemical structure] | methyl 5-((4-(2- (2,6-dioxopiperidin- 3-yl)-1-oxoiso- indolin-5-yl) piperidin-1-yl) methyl)furan-2- carboxylate |
| I-47 | [chemical structure] | 3-(5-(1-(naph- thalen-2-ylmethyl) piperidin-4-yl)-1- oxoisoindolin-2-yl) piperidine-2,6-dione |
| I-48 | [chemical structure] | 3-(1-oxo-5-(1- (quinolin-2- ylmethyl)piperidin- 4-yl)isoindolin-2- yl)piperidine-2,6- dione |
| I-49 | [chemical structure] | 3-(5-(1-(naphthalen- 1-ylmethyl) piperidin-4-yl)-1- oxoisoindolin-2-yl) piperidine-2,6-dione |
| I-50 | [chemical structure] | 3-(5-(1-((1- methyl-1H-benzo [d]imidazol-2-yl) methyl)piperidin- 4-yl)-1-oxoiso- indolin-2-yl) piperidine-2,6-dione |
| I-51 | [chemical structure] | 3-(1-oxo-5-(1-(4- (trifluoromethoxy) benzyl)piperidin- 4-yl)isoindolin-2- yl)piperidine-2,6- dione |
| I-52 | [chemical structure] | 3-(5-(1-(4-(1H- pyrrol-1-yl)benzyl) piperidin-4-yl)-1- oxoisoindolin-2-yl) piperidine-2,6-dione |
| I-53 | [chemical structure] | 3-(5-(1-(4-(1H-1,2,4- triazol-1-yl)benzyl) piperidin-4-yl)-1- oxoisoindolin-2-yl) piperidine-2,6-dione |
| I-54 | [chemical structure] | 3-(1-oxo-5-(1-(3- (trifluoromethoxy) benzyl)piperidin- 4-yl)isoindolin-2- yl)piperidine-2,6- dione |
| I-55 | [chemical structure] | 3-(1-oxo-5-(1- (2-(trifluoro- methoxy)benzyl) piperidin-4-yl) isoindolin-2-yl) piperidine-2,6-dione |
| I-56 | [chemical structure] | 3-(1-oxo-5-(1-((3- phenyl-1,2,4- oxadiazol-5-yl) methyl)piperidin- 4-yl)isoindolin-2- yl)piperidine-2,6- dione |
| I-57 | [chemical structure] | 3-(5-(1-benzyl- piperidin-4-yl)- 1-oxoisoindolin- 2-yl)piperidine- 2,6-dione |
| I-58 | [chemical structure] | 3-(1-oxo-5-(1- (pyridin-2-ylmethyl) piperidin-4-yl) isoindolin-2-yl) piperidine-2,6-dione |
| I-59 | [chemical structure] | 3-(1-oxo-5-(1- (pyridin-3-ylmethyl) piperidin-4-yl) isoindolin-2-yl) piperidine-2,6-dione |
| I-60 | [chemical structure] | 3-(1-oxo-5-(1- (pyridin-4-ylmethyl) piperidin-4-yl) isoindolin-2-yl) piperidine-2,6-dione |
| I-61 | [chemical structure] | 3-(1-oxo-5-(1- (pyrimidin-5- ylmethyl)piperidin- 4-yl)isoindolin- 2-yl)piperidine- 2,6-dione |
| I-62 | [chemical structure] | 3-(1-oxo-5-(1-(1- phenylethyl) piperidin-4-yl) isoindolin-2-yl) piperidine-2,6-dione |
| I-63 | [chemical structure] | 3-(5-(1-(4- (fluoromethyl) benzyl)piperidin- 4-yl)-1-oxoiso- indolin-2-yl) piperidine-2,6-dione |
| I-64 | [chemical structure] | 3-(5-(1-(3,4- difluorobenzyl) piperidin-4-yl)- 1-oxoisoindolin- 2-yl)piperidine- 2,6-dione |
| I-65 | [chemical structure] | 2-((4-(2-(2,6- dioxopiperidin-3- yl)-1-oxoiso- indolin-5-yl) piperidin-1-yl) methyl)pyrimidine- 5-carbonitrile |
| I-66 | [chemical structure] | 3-(5-(1-(4- ethylbenzyl) piperidin-4-yl)-1- oxoisoindolin-2- yl)piperidine-2,6- dione |
| I-67 | [chemical structure] | 3-(5-(1-(2- methoxybenzyl) piperidin-4-yl)-1- oxoisoindolin-2- yl)piperidine- 2,6-dione |
| I-68 | [chemical structure] | 3-(5-(1-((2- methoxypyri- midin-5-yl) methyl)piperidin- 4-yl)-1-oxoiso- indolin-2-yl) piperidine-2,6-dione |
| I-69 | [chemical structure] | 3-(5-(1-(3-fluoro- 4-methylbenzyl) piperidin-4-yl)- 1-oxoisoindolin- 2-yl)piperidine- 2,6-dione |
| I-70 | [chemical structure] | 3-(5-(1-(4- (difluoromethyl) benzyl)piperidin- 4-yl)-1-oxoiso- indolin-2-yl) piperidine-2,6-dione |
| I-71 | [chemical structure] | 4-((4-(2-(2,6- dioxopiperidin-3- yl)-1-oxoiso- indolin-5-yl) piperidin-1-yl) methyl)benzamide |
| I-72 | [chemical structure] | 4-((4-(2-(2,6- dioxopiperidin-3- yl)-1-oxoiso- indolin-5-yl) piperidin-1-yl) methyl)benzoic acid |
| I-73 | [chemical structure] | 3-(5-(1-(3- (difluoromethyl) benzyl)piperidin- 4-yl)-1-oxoiso- indolin-2-yl) piperidine-2,6-dione |
| I-74 | [chemical structure] | 3-((4-(2-(2,6-dioxo- piperidin-3-yl)-1- oxoisoindolin-5- yl)piperidin-1-yl) methyl)benzoic acid |
| I-75 | [chemical structure] | 3-(1-oxo-5-(1-(4- propylbenzyl) piperidin-4-yl) isoindolin-2-yl) piperidine-2,6-dione |
| I-76 | [chemical structure] | 3-(1-oxo-5-(1-(4- (trifluoromethyl) benzyl)piperidin-4- yl)isoindolin-2-yl) piperidine-2,6-dione |
| I-77 | [chemical structure] | 3-(5-(1-(4- (difluoromethoxy) benzyl)piperidin- 4-yl)-1-oxo- isoindolin-2-yl) piperidine-2,6-dione |
| I-78 | [chemical structure] | 3-(1-oxo-5-(1-((5- (trifluoromethyl) pyridin-2-yl) methyl)piperidin- 4-yl)isoindolin- 2-yl)piperidine- 2,6-dione |
| I-79 | [chemical structure] | 3-(5-(1-(3- (difluoromethoxy) benzyl)piperidin- 4-yl)-1-oxoiso- indolin-2-yl) piperidine-2,6-dione |
| I-80 | [chemical structure] | 3-(5-(1-(2- (difluoromethoxy) benzyl)piperidin- 4-yl)-1-oxoiso- indolin-2-yl) piperidine-2,6-dione |
| I-81 | [chemical structure] | 3-(5-(1-(4- cyclobutylbenzyl) piperidin-4-yl)-1- oxoisoindolin-2-yl) piperidine-2,6-dione |
| I-82 | [chemical structure] | 3-(5-(1-((2,3- dihydrobenzo[b] [1,4]dioxin-5-yl) methyl)piperidin- 4-yl)-1-oxoiso- indolin-2-yl) piperidine-2,6-dione |
| I-83 | [chemical structure] | 3-(5-(1-((2,3- dihydrobenzo[b] [1,4]dioxin-6-yl) methyl)piperidin- 4-yl)-1-oxoiso- indolin-2-yl) piperidine-2,6-dione |
| I-84 | [chemical structure] | 3-(5-(1-(4-(tert- butyl)benzyl) piperidin-4-yl)- 1-oxoisoindolin- 2-yl)piperidine- 2,6-dione |
| I-85 | [chemical structure] | 3-(5-(1-(4- isobutylbenzyl) piperidin-4-yl)- 1-oxoisoindolin- 2-yl)piperidine- 2,6-dione |
| I-86 | [chemical structure] | N-(4-((4-(2-(2,6- dioxopiperidin-3- yl)-1-oxoiso- indolin-5-yl) piperidin-1-yl) methyl)phenyl) acetamide |
| I-87 | [chemical structure] | 3-(5-(1-((2,2- difluorobenzo[d] [1,3]dioxol-5-yl) methyl)piperidin- 4-yl)-1-oxoiso- indolin-2-yl) piperidine-2,6-dione |
| I-88 | [chemical structure] | 3-(5-(1-((3,4- dihydro-2H-benzo [b][1,4]dioxepin- 7-yl)methyl) piperidin-4-yl)- 1-oxoiso- indolin-2-yl) piperidine-2,6-dione |
| I-89 | [chemical structure] | 3-(1-oxo-5-(1-(4- (tert-pentyl)benzyl) piperidin-4-yl) isoindolin-2-yl) piperidine-2,6-dione |
| I-90 | [chemical structure] | 3-(5-(1-([1,1′- biphenyl]-4- ylmethyl)piperidin- 4-yl)-1-oxoiso- indolin-2-yl) piperidine-2,6-dione |
| I-91 | [chemical structure] | 3-(5-(1-(4-(1H- pyrazol-1-yl) benzyl)piperidin- 4-yl)-1-oxoiso- indolin-2-yl) piperidine-2,6-dione |
| I-92 | [chemical structure] | 3-(5-(1-(4-(1H- imidazol-1-yl) benzyl)piperidin- 4-yl)-1-oxoiso- indolin-2-yl) piperidine-2,6-dione |
| I-93 | [chemical structure] | 3-(5-(1-(3-(1H- pyrazol-1-yl) benzyl)piperidin- 4-yl)-1-oxoiso- indolin-2-yl) piperidine-2,6-dione |
| I-94 | [chemical structure] | 3-(5-(1-(4- cyclohexylbenzyl) piperidin-4-yl)-1- oxoisoindolin-2-yl) piperidine-2,6-dione |
| I-95 | [chemical structure] | 3-(1-oxo-5-(1- (pyrimidin-2-yl- methyl)piperidin- 4-yl)isoindolin- 2-yl)piperidine- 2,6-dione |
| I-96 | [chemical structure] | 3-(5-(1-(4- bromobenzyl) piperidin-4-yl)- 1-oxoisoindolin- 2-yl)piperidine- 2,6-dione |
| I-97 | [chemical structure] | 3-(5-(1-(4- chlorobenzyl) piperidin-4-yl)- 1-oxoisoindolin- 2-yl)piperidine- 2,6-dione |
| I-98 | [chemical structure] | 3-(5-(1-(3,5- dichlorobenzyl) piperidin-4-yl)- 1-oxoisoindolin- 2-yl)piperidine- 2,6-dione |
| I-99 | [chemical structure] | 3-(5-(1-(4- chloro-3- fluorobenzyl) piperidin-4-yl)- 1-oxoisoindolin- 2-yl)piperidine- 2,6-dione |
| I-100 | [chemical structure] | 3-(5-(1-(3- chloro-4- fluorobenzyl) piperidin-4-yl)- 1-oxoisoindolin- 2-yl)piperidine- 2,6-dione |
| I-101 | [chemical structure] | 3-(5-(1-(2,4- difluorobenzyl) piperidin-4-yl)- 1-oxoisoindolin- 2-yl)piperidine- 2,6-dione |
| I-102 | [chemical structure] | 3-(5-(1-(3- methoxybenzyl) piperidin-4-yl)- 1-oxoisoindolin- 2-yl)piperidine- 2,6-dione |
| I-103 | [chemical structure] | 3-(5-(1-(benzo[c] [1,2,5]oxadiazol- 5-ylmethyl) piperidin-4-yl)-1- oxoisoindolin-2-yl) piperidine-2,6-dione |
| I-104 | [chemical structure] | 3-(5-(1-(2- cyclopropylbenzyl) piperidin-4-yl)-1- oxoisoindolin-2-yl) piperidine-2,6-dione |
| I-105 | [chemical structure] | 3-(5-(1-((1,3- dihydroisobenzo- furan-5-yl)methyl) piperidin-4-yl)-1- oxoisoindolin-2-yl) piperidine-2,6-dione |
| I-106 | [chemical structure] | 3-(1-oxo-5-(1-(2- (trifluoromethyl) benzyl)piperidin- 4-yl)isoindolin-2- yl)piperidine-2,6- dione |
| I-107 | [chemical structure] | 3-(5-(1-(3-(tert- butyl)benzyl) piperidin-4-yl)-1- oxoisoindolin-2-yl) piperidine-2,6-dione |
| I-108 | [chemical structure] | 3-(5-(1-(3- isopropoxybenzyl) piperidin-4-yl)-1- oxoisoindolin-2-yl) piperidine-2,6-dione |
| I-109 | [chemical structure] | 3-(1-oxo-5-(1-(4- (thiophen-3-yl) benzyl)piperidin- 4-yl)isoindolin- 2-yl)piperidine- 2,6-dione |
| I-110 | [chemical structure] | 3-(5-(1-(4- cyclopentylbenzyl) piperidin-4-yl)-1- oxoisoindolin-2-yl) piperidine-2,6-dione |
| I-111 | [chemical structure] | 3-(1-oxo-5-(1-(4- (pyrrolidin-1-yl) benzyl)piperidin- 4-yl)isoindolin- 2-yl)piperidine- 2,6-dione |
| I-112 | [chemical structure] | 3-(5-(1-(4- fluorobenzyl) piperidin-4-yl)-1- oxoisoindolin-2-yl) piperidine-2,6-dione |
| I-113 | [chemical structure] | 3-(5-(1-(2,4- dichlorobenzyl) piperidin-4-yl)-1- oxoisoindolin-2-yl) piperidine-2,6-dione |
| I-114 | [chemical structure] | 3-(1-oxo-5-(1- (quinolin-8- ylmethyl)piperidin- 4-yl)isoindolin-2- yl)piperidine-2,6- dione |
| I-115 | [chemical structure] | 3-(5-(1-((1-methyl- 1H-pyrazol-4-yl) methyl)piperidin- 4-yl)-1-oxoiso- indolin-2-yl) piperidine-2,6-dione |
| I-116 | [chemical structure] | 3-(5-(1-((1H- pyrazol-4-yl) methyl)piperidin- 4-yl)-1- oxoisoindolin-2-yl) piperidine-2,6-dione |
| I-117 | [chemical structure] | 3-(5-(1-((1-methyl- 1H-pyrazol-3-yl) methyl)piperidin-4- yl)-1-oxoiso- indolin-2-yl) piperidine-2,6-dione |
| I-118 | [chemical structure] | 3-(5-(1-((1H- pyrazol-3-yl)methyl) piperidin-4-yl)-1- oxoisoindolin-2-yl) piperidine-2,6-dione |
| I-119 | [chemical structure] | 3-(5-(1-((1H-pyrrol- 3-yl)methyl) piperidin-4-yl)-1- oxoisoindolin-2-yl) piperidine-2,6-dione |
| I-120 | [chemical structure] | 3-(5-(1-((1H- imidazol-5-yl) methyl)piperidin- 4-yl)-1-oxoiso- indolin-2-yl) piperidine-2,6-dione |
| I-121 | [chemical structure] | 3-(5-(1-((1-ethyl- 1H-pyrazol-3-yl) methyl)piperidin- 4-yl)-1-oxoiso- indolin-2-yl) piperidine-2,6-dione |
| I-122 | [chemical structure] | 3-(5-(1-((2- aminopyrimidin- 5-yl)methyl) piperidin-4-yl)- 1-oxoisoindolin- 2-yl)piperidine- 2,6-dione |
| I-123 | [chemical structure] | 3-(5-(1-((6- aminopyridin-3-yl) methyl)piperidin- 4-yl)-1-oxoiso- indolin-2-yl) piperidine-2,6-dione |
| I-124 | [chemical structure] | 3-(5-(1-((5-amino- 1-methyl-1H- pyrazol-4-yl) methyl)piperidin- 4-yl)-1-oxoiso- indolin-2-yl) piperidine-2,6-dione |
| I-125 | [chemical structure] | 3-(5-(1-((6- methylimidazo [2,1-b]thiazol-5- yl)methyl) piperidin-4-yl)- 1-oxoisoindolin- 2-yl)piperidine- 2,6-dione |
| I-126 | [chemical structure] | 3-(5-(1-(imidazo [1,2-a]pyrazin-3- ylmethyl)piperidin- 4-yl)-1-oxoiso- indolin-2-yl) piperidine-2,6-dione |
| I-127 | [chemical structure] | 3-(5-(1-([1,2,4] triazolo[1,5-a] pyridin-5-ylmethyl) piperidin-4-yl)-1- oxoisoindolin-2-yl) piperidine-2,6-dione |
| I-128 | [chemical structure] | 3-(1-oxo-5-(1- (pyrazolo[1,5-a] pyridin-4-ylmethyl) piperidin-4-yl) isoindolin-2-yl) piperidine-2,6-dione |
| I-129 | [chemical structure] | 3-(5-(1-((1,4- dimethyl-1H- imidazol-2-yl) methyl)piperidin- 4-yl)-1-oxoiso- indolin-2-yl) piperidine-2,6-dione |
| I-130 | [chemical structure] | 3-(5-(1-(benzo[d] thiazol-5-ylmethyl) piperidin-4-yl)-1- oxoisoindolin-2-yl) piperidine-2,6-dione |
| I-131 | [chemical structure] | 3-(1-oxo-5-(1- (pyrazolo[1,5-a] pyrimidin-6- ylmethyl)piperidin- 4-yl)isoindolin- 2-yl)piperidine- 2,6-dione |
| I-132 | [chemical structure] | 3-(5-(1-(imidazo [1,2-a]pyrimidin- 3-ylmethyl) piperidin-4-yl)-1- oxoisoindolin-2-yl) piperidine-2,6-dione |
| I-133 | [chemical structure] | 3-(5-(1-(imidazo [1,2-a]pyrimidin- 2-ylmethyl) piperidin-4-yl)-1- oxoisoindolin-2-yl) piperidine-2,6-dione |
| I-134 | [chemical structure] | 3-(5-(1-((1-cyclo- butyl-1H-1,2,3- triazol-4-yl) methyl)piperidin- 4-yl)-1-oxoiso- indolin-2-yl) piperidine-2,6-dione |
| I-135 | [chemical structure] | 3-(1-oxo-5-(1- ((4,5,6,7-tetra- hydropyrazolo [1,5-a]pyridin-2- yl)methyl) piperidin-4-yl) isoindolin-2-yl) piperidine-2,6-dione |
| I-136 | [chemical structure] | 3-(5-(1-((1H-indol- 2-yl)methyl) piperidin-4-yl)-1- oxoisoindolin-2-yl) piperidine-2,6-dione |
| I-137 | [chemical structure] | 3-(5-(1-((1H- indazol-6-yl) methyl)piperidin- 4-yl)-1-oxoiso- indolin-2-yl) piperidine-2,6-dione |
| I-138 | [chemical structure] | 3-(5-(1-((1H- pyrrolo[2,3-b] pyridin-3-yl) methyl)piperidin- 4-yl)-1-oxoiso- indolin-2-yl) piperidine-2,6-dione |
| I-139 | [chemical structure] | 3-((4-(2-(2,6- dioxopiperidin-3- yl)-1-oxoiso- indolin-5-yl) piperidin-1-yl) methyl)benzamide |
| I-140 | [chemical structure] | 3-(5-(1-((1H- pyrrolo[2,3-b] pyridin-6-yl) methyl)piperidin- 4-yl)-1-oxoiso- indolin-2-yl) piperidine-2,6-dione |
| I-141 | [chemical structure] | 3-(5-(1-((3,4- dihydro-2H-benzo [b][1,4]thiazin-6- yl)methyl) piperidin-4-yl)-1- oxoisoindolin-2- yl)piperidine-2,6- dione |
| I-142 | [chemical structure] | 3-(1-oxo-5-(1- ((2-(pyrrolidin- 1-yl)pyrimidin-5- yl)methyl) piperidin-4-yl) isoindolin-2-yl) piperidine-2,6-dione |
| I-143 | [chemical structure] | 3-(5-(1-((2-(tert- butyl)thiazol-4-yl) methyl)piperidin- 4-yl)-1-oxoiso- indolin-2-yl) piperidine-2,6-dione |
| I-144 | [chemical structure] | 3-(1-oxo-5-(1-((2- (thiophen-2-yl) thiazol-5-yl) methyl)piperidin- 4-yl)isoindolin-2- yl)piperidine-2,6- dione |
| I-145 | [chemical structure] | 3-(5-(1-((2-cyclo- hexylthiazol-5-yl) methyl)piperidin- 4-yl)-1-oxoiso- indolin-2-yl) piperidine-2,6-dione |
| I-146 | [chemical structure] | 3-(5-(1-((5-cyclo- propyl-1H-pyrazol- 3-yl)methyl) piperidin-4-yl)-1- oxoisoindolin-2-yl) piperidine-2,6-dione |
| I-147 | [chemical structure] | 3-(5-(1-((2- morpholino- pyrimidin-5-yl) methyl)piperidin- 4-yl)-1-oxoiso- indolin-2-yl) piperidine-2,6-dione |
| I-148 | [chemical structure] | 3-(1-oxo-5-(1-((3- phenyl-1H-pyrazol- 4-yl)methyl) piperidin-4-yl) isoindolin-2-yl) piperidine-2,6-dione |
| I-149 | [chemical structure] | 3-(5-(1-((6-methyl- 1H-indol-3-yl) methyl)piperidin- 4-yl)-1-oxoiso- indolin-2-yl) piperidine-2,6-dione |
| I-150 | [chemical structure] | methyl 4-((4-(2- (2,6-dioxo- piperidin-3-yl)-1- oxoisoindolin-5-yl) piperidin-1-yl) methyl)-1H- pyrrole-2- carboxylate |
| I-151 | [chemical structure] | 3-(1-oxo-5-(1-((3- (pyridin-3-yl)-1H- pyrazol-4-yl) methyl)piperidin- 4-yl)isoindolin-2- yl)piperidine-2,6- dione |
| I-152 | [chemical structure] | 3-(1-oxo-5-(1-((2- phenyl-1H-imidazol- 4-yl)methyl) piperidin-4-yl) isoindolin-2-yl) piperidine-2,6-dione |
| I-153 | [chemical structure] | 3-(1-oxo-5-(1-((5- (pyridin-2-yl)-1H- pyrazol-3-yl) methyl)piperidin- 4-yl)isoindolin-2- yl)piperidine-2,6- dione |
| I-154 | [chemical structure] | 3-(1-oxo-5-(1-((4- phenyl-1H-imidazol- 2-yl)methyl) piperidin-4-yl) isoindolin-2-yl) piperidine-2,6-dione |
| I-155 | [chemical structure] | 3-(1-oxo-5- (piperidin-4-yl) isoindolin-2-yl) piperidine-2,6-dione |
| I-156 | [chemical structure] | 3-(5-(1-(3,5- difluoro-4- hydroxybenzyl) piperidin-4-yl)-1- oxoisoindolin-2-yl) piperidine-2,6-dione |
| I-157 | [chemical structure] | 3-(5-(1-(2- methylbenzyl) piperidin-4-yl)-1- oxoisoindolin-2-yl) piperidine-2,6-dione |
| I-158 | [chemical structure] | 3-(5-(1-(4- methylbenzyl) piperidin-4-yl)-1- oxoisoindolin-2-yl) piperidine-2,6-dione |
| I-159 | [chemical structure] | 3-(5-(1-(3,5- dimethylbenzyl) piperidin-4-yl)-1- oxoisoindolin-2-yl) piperidine-2,6-dione |
| I-160 | [chemical structure] | 3-(5-((2S)-1- benzyl-2- methylpiperidin- 4-yl)-1- oxoisoindolin-2-yl) piperidine-2,6-dione |
| I-161 | [chemical structure] | 3-(5-((2R)-1- benzyl-2- methylpiperidin- 4-yl)-1- oxoisoindolin-2-yl) piperidine-2,6-dione |
| I-162 | [chemical structure] | 3-(5-(1-benzyl-2- methylpiperidin- 4-yl)-1- oxoisoindolin-2-yl) piperidine-2,6-dione |
| I-163 | [chemical structure] | 3-(5-(1-methyl- 1,2,3,6-tetrahydro- pyridin-4-yl)-1- oxoisoindolin-2-yl) piperidine-2,6-dione |
| I-164 | [chemical structure] | 3-(1-oxo-5-(1- ((5,6,7,8-tetra- hydronaphthalen- 1-yl)methyl) piperidin-4-yl) isoindolin-2-yl) piperidine-2,6-dione |
| I-165 | [chemical structure] | 3-(5-(azepan-4-yl)- 1-oxoisoindolin-2- yl)piperidine-2,6- dione |
| I-166 | [chemical structure] | 3-(5-((R)-azepan- 4-yl)-1- oxoisoindolin-2-yl) piperidine-2,6-dione |
| I-167 | [chemical structure] | 3-(5-((S)-azepan- 4-yl)-1-oxoiso- indolin-2-yl) piperidine-2,6-dione |
| I-168 | [chemical structure] | 3-(1-oxo-5-(1- ((1,2,3,4-tetra- hydronaphthalen- 1-yl)methyl) piperidin-4-yl) isoindolin-2-yl) piperidine-2,6-dione |
| I-169 | [chemical structure] | methyl 2-(4-(2- (2,6-dioxo- piperidin-3-yl)-1- oxoisoindolin-5-yl) piperidin-1-yl) acetate |
| I-170 | [chemical structure] | 3-(1-oxo-5-(1- phenylpiperidin-4- yl)isoindolin-2- yl)piperidine-2,6- dione |
| I-171 | [chemical structure] | 3-(1-oxo-5- (2,2,6,6- tetramethyl- piperidin-4-yl) isoindolin-2-yl) piperidine-2,6-dione |
| I-172 | [chemical structure] | 3-(5-(1-benzyl- 1,2,3,6-tetra- hydropyridin- 4-yl)-1-oxo- isoindolin-2-yl) piperidine-2,6-dione |
| I-173 | [chemical structure] | 3-(5-(1-(3- methylbenzyl) piperidin-4-yl)- 1-oxoisoindolin- 2-yl)piperidine- 2,6-dione |
| I-174 | [chemical structure] | 3-(5-(1-(2,6- dimethylbenzyl) piperidin-4-yl)-1- oxoisoindolin-2-yl) piperidine-2,6-dione |
| I-175 | [chemical structure] | 3-(1-oxo-5-(1- ((5,6,7,8-tetra- hydronaphthalen- 2-yl)methyl) piperidin-4-yl) isoindolin-2-yl) piperidine-2,6-dione |
| I-176 | [chemical structure] | ethyl 2-(4-(2-(2,6- dioxopiperidin-3- yl)-1-oxoiso- indolin-5-yl) piperidin-1-yl) acetate |
| I-177 | [chemical structure] | tert-butyl 2-(4- (2-(2,6-dioxo- piperidin-3-yl)-1- oxoisoindolin-5-yl) piperidin-1-yl) acetate |
| I-178 | [chemical structure] | 2-(4-(2-(2,6- dioxopiperidin-3- yl)-1-oxoiso- indolin-5-yl) piperidin-1-yl) acetic acid |
| I-179 | [chemical structure] | 3-(1-oxo-5-(1- (3,3,3-trifluoro- propyl)piperidin- 4-yl)isoindolin-2- yl)piperidine-2,6- dione |
| I-180 | [chemical structure] | 2-(4-(2-(2,6- dioxopiperidin- 3-yl)-1-oxo- isoindolin-5-yl) piperidin-1-yl)- N-phenylacetamide |
| I-181 | [chemical structure] | 3-(5-(1-(3- fluoropropyl) piperidin-4-yl)-1- oxoisoindolin-2-yl) piperidine-2,6-dione |
| I-182 | [chemical structure] | tert-butyl 4-((4-(2- (2,6-dioxo- piperidin-3-yl)-1- oxoisoindolin-5-yl) piperidin-1-yl) methyl)benzoate |
| I-183 | [chemical structure] | 3-(5-(2-methyl- piperidin-4-yl)-1- oxoisoindolin-2-yl) piperidine-2,6-dione |
| I-184 | [chemical structure] | 3-(5-(3,3-dimethyl- piperidin-4-yl)-1- oxoisoindolin-2-yl) piperidine-2,6-dione |
| I-185 | [chemical structure] | 3-(5-(1-benzyl-3,3- dimethylpiperidin- 4-yl)-1-oxoiso- indolin-2-yl) piperidine-2,6-dione |
| I-186 | [chemical structure] | 5-(3-methyl- piperidin-4-yl)-2- (2-oxopiperidin-3- yl)isoindolin-1-one |
| I-187 | [chemical structure] | 3-(5-(1-benzyl-3- methylpiperidin- 4-yl)-1- oxoisoindolin-2-yl) piperidine-2,6-dione |
| I-188 | [chemical structure] | 3-(5-(8- azabicyclo[3.2.1] octan-3-yl)-1- oxoisoindolin-2-yl) piperidine-2,6-dione |
| I-189 | [chemical structure] | 3-(5-(1-(2-hydroxy- 1-phenylethyl) piperidin-4-yl)-1- oxoisoindolin-2-yl) piperidine-2,6-dione |
| I-190 | [chemical structure] | 3-(5-((S)-1- benzylazepan-4- yl)-1-oxoiso- indolin-2-yl) piperidine-2,6-dione |
| I-191 | [chemical structure] | 3-(5-(1-benzyl-2,5- dihydro-1H-pyrrol- 3-yl)-1-oxoiso- indolin-2-yl) piperidine-2,6-dione |
| I-192 | [chemical structure] | 3-(5-(1-benzyl-2- oxo-1,2-dihydro- pyridin-4-yl)-1- oxoisoindolin-2-yl) piperidine-2,6-dione |
| I-193 | [chemical structure] | 3-(5-(1-benzyl-2- oxopiperidin-4-yl)- 1-oxoisoindolin- 2-yl)piperidine- 2,6-dione |
| I-194 | [chemical structure] | 3-(1-oxo-5-(2- oxopiperidin-4- yl)isoindolin-2- yl)piperidine- 2,6-dione |
| I-195 | [chemical structure] | 3-(1-oxo-5-(2- oxo-1,2- dihydropyridin-4- yl)isoindolin-2- yl)piperidine-2,6- dione |
| I-196 | [chemical structure] | 3-(1-oxo-5- (1,2,3,4- tetrahydro- quinolin-4-yl) isoindolin-2-yl) piperidine-2,6-dione |
| I-197 | [chemical structure] | 3-(5-(1-benzyl- 1,2,3,4-tetrahydro- quinolin-4-yl)-1 - oxoisoindolin-2-yl) piperidine-2,6-dione |
| I-198 | [chemical structure] | 3-(5-(1-((1-benzyl- 1H-tetrazol-5-yl) methyl)piperidin- 4-yl)-1-oxoiso- indolin-2-yl) piperidine-2,6-dione |
| I-199 | [chemical structure] | 3-(1-oxo-5-(1-((5- phenyl-1,3,4- oxadiazol-2-yl) methyl)piperidin- 4-yl)isoindolin- 2-yl)piperidine- 2,6-dione |
| I-200 | [chemical structure] | 3-(5-(1-(benzo[d] thiazol-2- ylmethyl)piperidin- 4-yl)-1-oxoiso- indolin-2-yl) piperidine-2,6-dione |
| I-201 | [chemical structure] | 3-(1-oxo-5-(1-((3- (pyridin-2-yl)-1H- pyrazol-5-yl) methyl)piperidin- 4-yl)isoindolin- 2-yl)piperidine- 2,6-dione |
| I-202 | [chemical structure] | 3-(5-(1-((R)-2- hydroxy-1- phenylethyl) piperidin-4-yl)-1- oxoisoindolin-2-yl) piperidine-2,6-dione |
| I-203 | [chemical structure] | 3-(5-(1-((1- methyl-1H- indazol-3-yl) methyl)piperidin- 4-yl)-1- oxoisoindolin-2-yl) piperidine-2,6-dione |
| I-204 | [chemical structure] | 3-(5-(1-((1,2,4- oxadiazol-3-yl) methyl)piperidin- 4-yl)-1-oxoiso- indolin-2-yl) piperidine-2,6-dione |
| I-205 | [chemical structure] | 3-(5-(1-(4-hydroxy- 3-((4-methyl- piperazin-1-yl) methyl)benzyl) piperidin-4-yl)-1- oxoisoindolin-2-yl) piperidine-2,6-dione |
| I-206 | [chemical structure] | 2-(4-((4-(2-(2,6- dioxopiperidin-3- yl)-1-oxoiso- indolin-5-yl) piperidin-1-yl) methyl)phenyl) acetonitrile |
| I-207 | [chemical structure] | 3-(5-(1-((2-(4- chlorophenyl)- 5-methyloxazol- 4-yl)methyl) piperidin-4-yl)- 1-oxoisoindolin- 2-yl)piperidine- 2,6-dione |
| I-208 | [chemical structure] | 3-(5-(1-((7- hydroxy-2- methylpyrazolo [1,5-a]pyrimidin- 5-yl)methyl) piperidin-4-yl)-1- oxoisoindolin-2-yl) piperidine-2,6-dione |
| I-209 | [chemical structure] | 3-(5-(1-(2,2- difluoro-1- phenylethyl) piperidin-4-yl)-1- oxoisoindolin-2-yl) piperidine-2,6-dione |
| I-210 | [chemical structure] | 3-(5-(1-((3- fluorobicyclo [1.1.1]pentan- 1-yl)methyl) piperidin-4-yl)-1- oxoisoindolin-2-yl) piperidine-2,6-dione |
| I-211 | [chemical structure] | 3-(1-oxo-5-(1-((2- phenylthiazol-4- yl)methyl) piperidin-4-yl) isoindolin-2-yl) piperidine-2,6-dione |
| I-212 | [chemical structure] | 3-(5-(1-(2-fluoro- 1-phenylethyl) piperidin-4-yl)-1- oxoisoindolin-2-yl) piperidine-2,6-dione |
| I-213 | [chemical structure] | 3-(1-oxo-5-(1- ((4-oxo-3,4- dihydrothieno [3,2-d]pyrimidin- 2-yl)methyl) piperidin-4-yl) isoindolin-2-yl) piperidine-2,6-dione |
| I-214 | [chemical structure] | 3-(1-oxo-5-(1- (quinolin-4- ylmethyl) piperidin-4-yl) isoindolin-2-yl) piperidine-2,6-dione |
| I-215 | [chemical structure] | 3-(5-(1-(3,5- bis(trifluoro- methyl)benzyl) piperidin-4-yl)-1- oxoisoindolin-2-yl) piperidine-2,6-dione |
| I-216 | [chemical structure] | 3-((4-(2-(2,6- dioxopiperidin-3- yl)-1-oxoiso- indolin-5-yl) piperidin-1-yl) methyl)-N,N- dimethylbenzene- sulfonamide |
| I-217 | [chemical structure] | 6-((4-(2-(2,6- dioxopiperidin- 3-yl)-1-oxoiso- indolin-5-yl) piperidin-1-yl) methyl)picolino- nitrile |
| I-218 | [chemical structure] | 2-(4-((4-(2- (2,6-dioxo- piperidin-3-yl)- 1-oxoisoindolin- 5-yl)piperidin- 1-yl)methyl) phenoxy) acetonitrile |
| I-219 | [chemical structure] | 3-(5-(1-((1H- indazol-5-yl) methyl)piperidin- 4-yl)-1- oxoisoindolin-2-yl) piperidine-2,6-dione |
| I-220 | [chemical structure] | 3-(5-(1-(2,2- difluoroethyl) piperidin-4-yl)- 1-oxoisoindolin- 2-yl)piperidine- 2,6-dione |
| I-221 | [chemical structure] | 3-(5-(1-((7- methyl-4-oxo- 4H-pyrido[1,2-a] pyrimidin-2-yl) methyl)piperidin- 4-yl)-1- oxoisoindolin-2-yl) piperidine-2,6-dione |
| I-222 | [chemical structure] | benzyl 4-(2-(2,6- dioxopiperidin- 3-yl)-1- oxoisoindolin-5-yl) piperidine-1- carboxylate |
| I-223 | [chemical structure] | 3-(1-oxo-5-(1-(2- phenylacetyl) piperidin-4-yl) isoindolin-2-yl) piperidine-2,6-dione |
| I-224 | [chemical structure] | 3-(1-oxo-5-(1- (2,2,2-trifluoro-1- phenylethyl) piperidin-4-yl) isoindolin-2-yl) piperidine-2,6-dione |
| I-225 | [chemical structure] | 3-(5-(1-(4-(5- methylbenzo[d] thiazol-2-yl) benzyl)piperidin- 4-yl)-1- oxoisoindolin-2-yl) piperidine-2,6-dione |
| I-226 | [chemical structure] | 3-(5-(1-(iso- quinolin-1- ylmethyl) piperidin-4-yl)-1- oxoisoindolin-2-yl) piperidine-2,6-dione |
| I-227 | [chemical structure] | 3-(5-(1-(4-(4- methoxypiperidin- 1-yl)benzyl) piperidin-4-yl)-1- oxoisoindolin-2-yl) piperidine-2,6-dione |
| I-228 | [chemical structure] | 3-(5-(1-(4- (isopropylthio) benzyl)piperidin- 4-yl)-1- oxoisoindolin-2-yl) piperidine-2,6-dione |
| I-229 | [chemical structure] | tert-butyl (5-((4- (2-(2,6-dioxo- piperidin-3-yl)-1- oxoisoindolin-5-yl) piperidin-1-yl) methyl)-4- (trifluoromethyl) thiazol-2-yl) carbamate |
| I-230 | [chemical structure] | 3-(1-oxo-5-(1-((S)- 1-phenylethyl) piperidin-4-yl) isoindolin-2-yl) piperidine-2,6-dione |
| I-231 | [chemical structure] | 2-(4-((4-(2-(2,6- dioxopiperidin-3- yl)-1- oxoisoindolin-5-yl) piperidin-1-yl) methyl)phenyl) acetic acid |
| I-232 | [chemical structure] | 3-(5-(1-((7-fluoro- quinolin-2-yl) methyl)piperidin- 4-yl)-1- oxoisoindolin-2-yl) piperidine-2,6-dione |
| I-233 | [chemical structure] | 3-(5-(1-((5-methyl- 2-(4-(trifluoro- methyl)phenyl) oxazol-4-yl) methyl)piperidin- 4-yl)-1- oxoisoindolin-2-yl) piperidine-2,6-dione |
| I-234 | [chemical structure] | 3-(5-(1-((2- amino-4- (trifluoromethyl) thiazol-5-yl) methyl)piperidin- 4-yl)-1- oxoisoindolin-2-yl) piperidine-2,6-dione |
| I-235 | [chemical structure] | 3-((4-(2-(2,6- dioxopiperidin-3- yl)-1-oxoisoin- dolin-5-yl) piperidin-1-yl) methyl)-1,2,4- oxadiazole-5- carboxamide |
| I-236 | [chemical structure] | 3-(5-(1-(3- (morpholino- sulfonyl)benzyl) piperidin-4-yl)-1- oxoisoindolin-2-yl) piperidine-2,6-dione |
| I-237 | [chemical structure] | 4-((4-(2-(2,6- dioxopiperidin-3- yl)-1-oxoiso- indolin-5-yl) piperidin-1-yl) methyl)-N,N- dimethylbenzene- sulfonamide |
| I-238 | [chemical structure] | 3-(1-oxo-5-(1- (thiazol-4- ylmethyl)piperidin- 4-yl)isoindolin- 2-yl)piperidine- 2,6-dione |
| I-239 | [chemical structure] | 3-(1-oxo-5-(1- (quinoxalin-6- ylmethyl)piperidin- 4-yl)isoindolin- 2-yl)piperidine- 2,6-dione |
| I-240 | [chemical structure] | 3-(5-(1-((2-(4- fluorophenyl)-5- methyloxazol-4- yl)methyl)piperidin- 4-yl)-1- oxoisoindolin-2-yl) piperidine-2,6-dione |
| I-241 | [chemical structure] | 3-(1-oxo-5-(1-((3- (m-tolyl)-1,2,4- oxadiazol-5-yl) methyl)piperidin- 4-yl)isoindolin-2- yl)piperidine-2,6- dione |
| I-242 | [chemical structure] | 3-(5-(1-(4-(tert- butyl)benzoyl) piperidin-4-yl)- 1-oxoisoindolin- 2-yl)piperidine- 2,6-dione |
| I-243 | [chemical structure] | 3-(1-oxo-5-(1- ((5-(4- (trifluoromethyl) phenyl)-1,2,4- oxadiazol-3-yl) methyl)piperidin- 4-yl)isoindolin- 2-yl)piperidine- 2,6-dione |
| I-244 | [chemical structure] | 3-(5-(1-(4-((4- fluorobenzyl) oxy)benzyl) piperidin-4-yl)-1- oxoisoindolin-2-yl) piperidine-2,6-dione |
| I-245 | [chemical structure] | 3-(5-(1-((3- methylisoxazol-5- yl)methyl)piperidin- 4-yl)-1- oxoisoindolin-2-yl) piperidine-2,6-dione |
| I-246 | [chemical structure] | 3-(5-(1-(isoxazol- 3-ylmethyl) piperidin-4-yl)-1- oxoisoindolin-2-yl) piperidine-2,6-dione |
| I-247 | [chemical structure] | 3-(1-oxo-5-(1- ((R)-1-phenylethyl) piperidin-4-yl) isoindolin-2-yl) piperidine-2,6-dione |
| I-248 | [chemical structure] | 3-(5-(1-(4- (methoxymethyl) benzyl)piperidin- 4-yl)-1- oxoisoindolin-2-yl) piperidine-2,6-dione |
| I-249 | [chemical structure] | 3-(5-(1-((S)-2- hydroxy-1- phenylethyl) piperidin-4-yl)-1- oxoisoindolin-2-yl) piperidine-2,6-dione |
| I-250 | [chemical structure] | 3-(1-oxo-5-(1- (phenylsulfonyl) piperidin-4-yl) isoindolin-2-yl) piperidine-2,6-dione |
| I-251 | [chemical structure] | 3-(5-(1-((5-methyl- 3-phenylisoxazol- 4-yl)methyl) piperidin-4-yl)-1- oxoisoindolin-2-yl) piperidine-2,6-dione |
| I-252 | [chemical structure] | 3-(5-(1-(4- ((difluoromethyl) sulfonyl)benzyl) piperidin-4-yl)-1- oxoisoindolin-2-yl) piperidine-2,6-dione |
| I-253 | [chemical structure] | 3-(1-oxo-5-(1- (2,2,2-trifluoro- ethyl)piperidin- 4-yl)isoindolin- 2-yl)piperidine- 2,6-dione |
| I-254 | [chemical structure] | methyl 2-((4- (2-(2,6- dioxopiperidin- 3-yl)-1- oxoisoindolin-5-yl) piperidin-1-yl) methyl)oxazole-4- carboxylate |
| I-255 | [chemical structure] | 3-(1-oxo-5-(1-(4- (pyridin-2- ylmethoxy)benzyl) piperidin-4-yl) isoindolin-2-yl) piperidine-2,6-dione |
| I-256 | [chemical structure] | 3-(5-(1-acetyl- piperidin-4-yl)-1- oxoisoindolin-2-yl) piperidine-2,6-dione |
| I-257 | [chemical structure] | 3-(5-(1-((5- methyl-2- phenyloxazol-4- yl)methyl)piperidin- 4-yl)-1- oxoisoindolin-2-yl) piperidine-2,6-dione |
| I-258 | [chemical structure] | 3-(5-(1-((3- cyclohexyl- isoxazol-5-yl) methyl)piperidin- 4-yl)-1- oxoisoindolin-2-yl) piperidine-2,6-dione |
| I-259 | [chemical structure] | 3-(1-oxo-5-(1-((2- oxo-2,3-dihydro- 1H-benzo[d] imidazol-5-yl) methyl)piperidin- 4-yl)isoindolin- 2-yl)piperidine- 2,6-dione |
| I-260 | [chemical structure] | 3-(5-(1- benzylpyrrolidin- 3-yl)-1- oxoisoindolin-2-yl) piperidine-2,6-dione |
| I-261 | [chemical structure] | (R)-3-(5-((R)-1- benzylazepan-4- yl)-1-oxoisoindolin- 2-yl)piperidine- 2,6-dione |
| I-262 | [chemical structure] | (S)-3-(5-((S)-1- benzylazepan-4- yl)-1-oxoisoindolin- 2-yl)piperidine- 2,6-dione |
| I-263 | [chemical structure] | 3-(5-(1- benzylazepan-4- yl)-1-oxoisoindolin- 2-yl)piperidine- 2,6-dione |
| I-264 | [chemical structure] | 3-(5-(1-methyl- 2,3,6,7-tetrahydro- 1H-azepin-4-yl)-1- oxoisoindolin-2-yl) piperidine-2,6-dione |
| I-265 | [chemical structure] | 3-(5-(8-benzyl-8- azabicyclo[3.2.1] octan-3-yl)-1- oxoisoindolin-2-yl) piperidine-2,6-dione |
| I-266 | [chemical structure] | trans-3-(1-oxo-5- (1-((4-(trifluoro- methyl)cyclohexyl) methyl)piperidin-4- yl)isoindolin-2-yl) piperidine-2,6-dione |
| I-267 | [chemical structure] | (S)-3-(1-oxo-5- ((S)-piperidin-3- yl)isoindolin-2- yl)piperidine- 2,6-dione |
| I-268 | [chemical structure] | 3-(5-(1-acetyl- 1,2,5,6-tetrahydro- pyridin-3-yl)-1- oxoisoindolin-2-yl) piperidine-2,6-dione |
| I-269 | [chemical structure] | (R)-3-(5-((R)-1- acetylpyrrolidin- 3-yl)-1- oxoisoindolin-2- yl)piperidine- 2,6-dione |
| I-270 | [chemical structure] | 3-(5-(1-acetyl- 1,2,3,6-tetra- hydropyridin-4- yl)-1-oxoiso- indolin-2-yl) piperidine-2,6-dione |
| I-271 | [chemical structure] | 3-(5-(octahydro- indolizin-7-yl)-1- oxoisoindolin-2-yl) piperidine-2,6-dione |
| I-272 | [chemical structure] | (R)-3-(5-((S)-1- benzylazepan-4- yl)-1-oxoiso- indolin-2-yl) piperidine-2,6-dione |
| I-273 | [chemical structure] | 3-(5-((R)-1- benzylazepan-4- yl)-1-oxoiso- indolin-2-yl) piperidine-2,6-dione |
| I-274 | [chemical structure] | 3-(5-(2,5-dihydro- 1H-pyrrol-3-yl)-1- oxoisoindolin-2-yl) piperidine-2,6-dione |
| I-275 | [chemical structure] | 3-(5-(1-acetyl-2,5- dihydro-1H- pyrrol-3-yl)-1- oxoisoindolin-2-yl) piperidine-2,6-dione |
| I-276 | [chemical structure] | cis-3-(1-oxo-5-(1- ((4-(trifluoro- methyl)cyclohexyl) methyl)piperidin- 4-yl)isoindolin- 2-yl)piperidine- 2,6-dione |
| I-277 | [chemical structure] | 3-(1-oxo-5- (2,3,6,7- tetrahydro-1H- azepin-4-yl) isoindolin-2-yl) piperidine-2,6-dione |
| I-278 | [chemical structure] | 3-(5-(1-methyl- azepan-4-yl)-1- oxoisoindolin-2-yl) piperidine-2,6-dione |
| I-279 | [chemical structure] | (R)-3-(1-oxo-5-((S)- piperidin-3-yl) isoindolin-2-yl) piperidine-2,6-dione |
| I-280 | [chemical structure] | 3-(1-oxo-5-(1,2,3,6- tetrahydropyridin- 4-yl)isoindolin-2- yl)piperidine-2,6- dione |
| I-281 | [chemical structure] | (S)-3-(5-((R)-1- benzylazepan-4-yl)- 1-oxoisoindolin-2- yl)piperidine-2,6- dione |
| I-282 | [chemical structure] | 3-(1-oxo-5- (1,2,5,6-tetra- hydropyridin-3- yl)isoindolin-2- yl)piperidine- 2,6-dione |
| I-283 | [chemical structure] | 3-(1-oxo-5- (2,2,6,6-tetra- methyl-1,2,3,6- tetrahydro- pyridin-4-yl) isoindolin-2-yl) piperidine-2,6-dione |
| I-284 | [chemical structure] | (S)-3-(5-((R)-1- acetylpyrrolidin- 3-yl)-1- oxoisoindolin-2-yl) piperidine-2,6-dione |
| I-285 | [chemical structure] | 3-(5-(1-((6- isopropoxy- pyridin-3-yl) methyl)piperidin- 4-yl)-1-oxo- isoindolin-2-yl) piperidine-2,6-dione |
| I-286 | [chemical structure] | 3-(1-oxo-5-(1-((1- phenyl-1H-pyrazol- 5-yl)methyl) piperidin-4-yl) isoindolin-2-yl) piperidine-2,6-dione |
| I-287 | [chemical structure] | 3-(5-(1-(4- ethoxybenzyl) piperidin-4-yl)-1- oxoisoindolin-2-yl) piperidine-2,6-dione |
| I-288 | [chemical structure] | 3-(1-oxo-5-(1-((1- phenyl-1H- pyrazol-4-yl) methyl)piperidin- 4-yl)isoindolin- 2-yl)piperidine- 2,6-dione |
| I-289 | [chemical structure] | 3-(5-(1-((1- isopropyl-1H- pyrazol-5-yl) methyl)piperidin- 4-yl)-1-oxo- isoindolin-2-yl) piperidine-2,6-dione |
| I-290 | [chemical structure] | 3-(5-(1-(iso- thiazol-5-yl- methyl)piperidin- 4-yl)-1-oxo- isoindolin-2-yl) piperidine-2,6-dione |
| I-291 | [chemical structure] | 3-(5-(1-((1- isopropyl-1H- pyrazol-4-yl) methyl)piperidin- 4-yl)-1-oxo- isoindolin-2-yl) piperidine-2,6-dione |
| I-292 | [chemical structure] | 3-(5-(1-((1H- pyrazol-5-yl) methyl)piperidin- 4-yl)-1-oxo- isoindolin-2-yl) piperidine-2,6-dione |
| I-293 | [chemical structure] | 3-(5-(1-((5-iso- propoxypyridin- 2-yl)methyl) piperidin-4-yl)-1- oxoisoindolin-2-yl) piperidine-2,6-dione |
| I-294 | [chemical structure] | 3-(1-oxo-5-(1-((1- (pyridin-3-yl)-1H- pyrazol-5-yl) methyl)piperidin- 4-yl)isoindolin- 2-yl)piperidine- 2,6-dione |
| I-295 | [chemical structure] | 3-(1-oxo-5-(1- ((1-(pyridin-3-yl)- 1H-pyrazol-4-yl) methyl)piperidin- 4-yl)isoindolin- 2-yl)piperidine- 2,6-dione |
| I-296 | [chemical structure] | 5-((4-(2-(2,6- dioxopiperidin-3- yl)-1-oxoiso- indolin-5-yl) piperidin-1-yl) methyl)-2- fluorobenzonitrile |
| I-297 | [chemical structure] | 3-(5-(1-((5- fluoropyridin-2-yl) methyl)piperidin- 4-yl)-1-oxoiso- indolin-2-yl) piperidine-2,6-dione |
| I-298 | [chemical structure] | 3-(5-(1-((1-ethyl- 3-(pyridin-3-yl)- 1H-pyrazol-4-yl) methyl)piperidin- 4-yl)-1-oxoiso- indolin-2-yl) piperidine-2,6-dione |
| I-299 | [chemical structure] | 3-(5-(1-((6- methoxypyridin-2- yl)methyl)piperidin- 4-yl)-1- oxoisoindolin-2-yl) piperidine-2,6-dione |
| I-300 | [chemical structure] | 3-(5-(1-((3- ((3S,5S)-adamantan- 1-yl)-1H-pyrazol- 5-yl)methyl) piperidin-4-yl)-1- oxoisoindolin-2-yl) piperidine-2,6-dione |
| I-301 | [chemical structure] | 3-(5-(1-((6-isopro- poxypyridin-2-yl) methyl)piperidin- 4-yl)-1- oxoisoindolin-2-yl) piperidine-2,6-dione |
| I-302 | [chemical structure] | 3-(5-(1-((1-benzyl- 5-(pyridin-2-yl)- 1H-pyrazol-3-yl) methyl)piperidin- 4-yl)-1- oxoisoindolin-2-yl) piperidine-2,6-dione |
| I-303 | [chemical structure] | trans-3-(5-(1-((4- methoxycyclohexyl) methyl)piperidin-4- yl)-1-oxoisoindolin- 2-yl)piperidine-2,6- dione |

[0958] In another aspect, the degradation compound is a compound of Formula (II):

[chemical structure]

or a pharmaceutically acceptable salt, ester, hydrate, tautomer, or prodrug thereof, wherein:
[0959] X is O or S;
[0960] R¹ is C₁-C₆ alkyl, C₂-C₆ alkenyl, C₂-C₆ alkynyl, C₁-C₆ heteroalkyl, carbocyclyl, heterocyclyl, aryl, or heteroaryl, each of which is independently and optionally substituted by one or more R⁴;
[0961] each of R^{2a} and R^{2b} is independently hydrogen or C₁-C₆ alkyl; or R^{2a} and R^{2b} together with the carbon atom to which they are attached to form carbonyl group or thiocarbonyl group;
[0962] each of R¹⁰ is independently C₁-C₆ alkyl, C₂-C₆ alkenyl, C₂-C₆ alkynyl, C₁-C₆ heteroalkyl, halo, cyano, —C(O)R^{A}, —C(O)OR^{B}, —OR^{B}, —N(R^{C})(R^{D}), —C(O)N(R^{C})(R^{D}), —N(R^{C})C(O)R^{A}, —S(O)ₓR^{E}, —S(O)ₓN(R^{C})(R^{D}), or —N(R^{C})S(O)ₓR^{E}, or L-Tag; wherein each alkyl, alkenyl, alkynyl, and heteroalkyl is independently and optionally substituted with one or more R¹¹;
[0963] each R⁴ is independently C₁-C₆ alkyl, C₂-C₆ alkenyl, C₂-C₆ alkynyl, C₁-C₆ heteroalkyl, halo, cyano, oxo, C(O)R^{A}, —C(O)OR^{B}, OR^{B}, —N(R^{C})(R^{D}), —C(O)N(R^{C})(R^{D}), —N(R^{C})C(O)R^{A}, S(O)ₓR^{E}, —S(O)ₓN(R^{C})(R^{D}), —N(R^{C})S(O)ₓR^{E}, carbocyclyl, heterocyclyl, aryl, or heteroaryl, wherein each alkyl, alkenyl, alkynyl, heteroalkyl, carbocyclyl, heterocyclyl, aryl, and heteroaryl is independently and optionally substituted with one or more R⁷;
[0964] each of R^{A}, R^{B}, R^{C}, R^{D}, and R^{E} is independently hydrogen or C₁-C₆ alkyl;
[0965] each R¹¹ is independently C₁-C₆ alkyl, halo, oxo, cyano, —OR^{B}, —N(R^{C})(R^{D}), —C(O)N(R^{C})(R^{D}), —N(R^{C})C(O)R^{A}, aryl, or heteroaryl, wherein each aryl and heteroaryl is independently and optionally substituted with one or more R⁸.
[0966] each R⁷ is independently halo, oxo, cyano, —OR^{B}, —N(R^{C})(R^{D}), —C(O)N(R^{C})(R^{D}), or —N(R^{C})C(O)R^{A};
[0967] each R⁸ is independently C₁-C₆ alkyl, halo, cyano, —OR^{B}, —N(R^{C})(R^{D}), —C(O)N(R^{C})(R^{D}), or —N(R^{C})C(O)R^{A};
[0968] each L is independently C₁-C₆ alkyl, C₂-C₆ alkenyl, C₂-C₆ alkynyl, C₁-C₆ heteroalkyl, —C(O)R^{A1}, —C(O)OR^{B1}, —OR^{B1}, —N(R^{C1})(R^{D1}), —C(O)N(R^{C1})(R^{D1}), —N(R^{C1})C(O)R^{A1}, —S(O)ₓR^{E1}, —S(O)ₓN(R^{C1})(R^{D1}) or —N (R^{C1})S(O)ₓR^{E1}, wherein each alkyl, alkenyl, alkynyl, and heteroalkyl is independently and optionally substituted with one or more R¹²
[0969] each Tag is a targeting moiety capable of binding to a target protein;
[0970] each of R^{A1}, R^{B1}, R^{C1}, R^{D1}, and R^{E1} is independently hydrogen, C₁-C₆ alkyl, C₂-C₆ alkenyl, C₂-C₆ alkynyl, C₁-C₆ heteroalkyl, carbocyclyl, heterocyclyl, aryl, or heteroaryl, wherein each alkyl, alkenyl, alkynyl, heteroalkyl, carbocyclyl, heterocyclyl, aryl, and heteroaryl is independently and optionally substituted with one or more R¹²
[0971] each R¹² is independently C₁-C₆ alkyl, halo, cyano, carbocyclyl, or heterocyclyl;
[0972] n is 0, 1, 2, 3 or 4; and
[0973] x is 0, 1, or 2.

[0974] In some embodiments, X is O.

[0975] In some embodiments, R¹ is C₁-C₆ alkyl, C₂-C₆ alkenyl, C₂-C₆ alkynyl, C₁-C₆ heteroalkyl, carbocyclyl, heterocyclyl, aryl, or heteroaryl, each of which is independently and optionally substituted by 1-12 R⁴ (e.g., 1 R⁴, 2 R⁴, 3 R⁴, 4 R⁴, 5 R⁴, 6 R⁴, 7 R⁴, 8 R⁴, 9 R⁴, 10 R⁴, 11 R⁴, or 12 R⁴). In some embodiments, R¹ is C₁-C₆ alkyl or heterocyclyl. In some embodiments, R¹ is C₁-C₆ alkyl (e.g., methyl or ethyl) substituted by R⁴. In some embodiments, R¹ is C₁-C₆ alkyl (e.g., methyl or ethyl) substituted by 1-6 R⁴. In some embodiments, R¹ is heterocyclyl. In some embodiments, R¹ is a 6-membered heterocyclyl or a 5-membered heterocyclyl. In some embodiments, R¹ is a 6-membered heterocyclyl or a 5-membered heterocyclyl optionally substituted with 1-6 R⁴ (e.g., 1 R⁴, 2 R⁴, 3 R⁴, 4 R⁴, 5 R⁴, or 6 R⁴). In some embodiments, R¹ is a nitrogen-containing heterocyclyl. In some embodiments, R¹ is piperidinyl (e.g., piperidine-2,6-dionyl).

[0976] In some embodiments, each of R^{2a} and R^{2b} is independently hydrogen. In some embodiments, R^{2a} and R^{2b} together with the carbon to which they are attached form a carbonyl group.

[0977] In some embodiments, each R¹⁰ is independently C₁-C₆ alkyl, C₂-C₆ alkenyl, C₂-C₆ alkynyl, C₁-C₆ heteroalkyl, halo, cyano, —C(O)R^{A}, —C(O)OR^{B}, —OR^{B}, —N(R^{C})(R^{D}), —C(O)N(R^{C})(R^{D}), —N(R^{C})C(O)R^{A}, —S(O)ₓR^{E}, —S(O)ₓN(R^{C})(R^{D}), or —N(R^{C})S(O)ₓR^{E}, or L-Tag; wherein each alkyl, alkenyl, alkynyl, and heteroalkyl is independently and optionally substituted with 1-12 R¹¹ (e.g., 1 R¹¹, 2 R¹¹, 3 R¹¹, 4 R¹¹, 5 R¹¹, 6 R¹¹, 7 R¹¹, 8 R¹¹, 9 R¹¹, 10 R¹¹, 11 R¹¹, or 12 R¹¹). In some embodiments, R¹⁰ is C₁-C₆ heteroalkyl, —N(R^{C})(R^{D}) or —N(R^{C})C(O)R^{A}. In some embodiments, R¹⁰ is C₁-C₆ heteroalkyl (e.g., CH₂NHC(O)CH₂), —N(R^{C})(R^{D}) (e.g., NH₂), or —N(R^{C})C(O)R^{A} (e.g., NHC(O)CH₃).

[0978] In some embodiments, each R⁴ is independently C₁-C₆ alkyl, C₂-C₆ alkenyl, C₂-C₆ alkynyl, C₁-C₆ heteroalkyl, halo, cyano, oxo, C(O)R^{A}, —C(O)OR^{B}, OR^{B}, —N(R^{C})(R^{D}), —C(O)N(R^{C})(R^{D}), —N(R^{C})C(O)R^{A}, S(O)_{X}R^{E}, —S(O)ₓN(R^{C})(R^{D}), —N(R^{C})S(O)ₓR^{E}, carbocyclyl, heterocyclyl, aryl, or heteroaryl, wherein each alkyl, alkenyl, alkynyl, heteroalkyl, carbocyclyl, heterocyclyl, aryl, and heteroaryl is independently and optionally substituted with 1-12 R⁷ (e.g., 1 R⁷, 2 R⁷, 3 R⁷, 4 R⁷, 5 R⁷, 6 R⁷, 7 R⁷, 8 R⁷, 9 R⁷, 10 R⁷, 11 R⁷, or 12 R⁷).

[0979] In some embodiments, each R¹¹ is independently C₁-C₆ alkyl, halo, oxo, cyano, —OR^{B}, —N(R^{C})(R^{D}), —C(O)N(R^{C})(R^{D}), —N(R^{C})C(O)R^{A}, aryl, or heteroaryl, wherein each aryl and heteroaryl is independently and optionally substituted with 1-6 R⁸ (e.g., 1 R⁸, 2 R⁸, 3 R⁸, 4 R⁸, 5 R⁸, or 6 R⁸).

[0980] In some embodiments, each L is independently C₁-C₆ alkyl, C₂-C₆ alkenyl, C₂-C₆ alkynyl, C₁-C₆ heteroalkyl, —C(O)R^{A1}, —C(O)OR^{B1}, —OR^{B1}, —N(R^{C1})(R^{D1}), —C(O)N(R^{C1})(R^{D1}), —N(R^{C1})C(O)R^{A1}, —S(O)ₓR^{E1}, —S(O)ₓN(R^{C1})(R^{D1}), or —N(R^{C1})S(O)ₓR^{E1}, wherein each alkyl, alkenyl, alkynyl, and heteroalkyl is independently and optionally substituted with 1-12 R¹² (e.g., 1 R¹², 2 R¹², 3 R¹², 4 R¹², 5 R¹², 6 R¹², 7 R¹², 8 R¹², 9 R¹², 10 R¹², 11 R¹², or 12 R¹²).

[0981] In some embodiments, each of R^{A1}, R^{B1}, R^{C1}, R^{D1}, and R^{E1} is independently hydrogen, C₁-C₆ alkyl, C₂-C₆ alkenyl, C₂-C₆ alkynyl, C₁-C₆ heteroalkyl, carbocyclyl, heterocyclyl, aryl, or heteroaryl, wherein each alkyl, alkenyl, alkynyl, heteroalkyl, carbocyclyl, heterocyclyl, aryl, and heteroaryl is independently and optionally substituted with 1-12 R¹² (e.g., 1 R¹², 2 R¹², 3 R¹², 4 R¹², 5 R¹², 6 R¹², 7 R¹², 8 R¹², 9 R¹², 10 R¹², 11 R¹², or 12 R¹²).

[0982] In an embodiment, X is O. In an embodiment, R¹ is heterocyclyl (e.g., piperidine-2,6-dionyl). In an embodiment, each of R^{2a} and R^{2b} is independently hydrogen. In an embodiment, n is 1. In an embodiment, R¹⁰ is —N(R^{C})(R^{D}) (e.g., —NH₂). In an embodiment, the degradation compound comprises lenalidomide, e.g., 3-(4-amino-1-oxoisoindolin-2-yl)piperidine-2,6-dione, or a pharmaceutically acceptable salt thereof. In an embodiment, the degradation compound is lenalidomide, e.g., according to the following formula:

[chemical structure]

[0983] In an embodiment, X is O. In an embodiment, R¹ is heterocyclyl (e.g., piperidinyl-2,6-dionyl). In some embodiments, R^{2a} and R^{2b} together with the carbon to which they are attached form a carbonyl group. In an embodiment, n is 1. In an embodiment, R¹⁰ is —N(R^{C})(R^{D}) (e.g., —NH₂). In an embodiment, the degradation compound comprises pomalidomide, e.g., 4-amino-2-(2,6-dioxopiperidin-3-yl)isoindoline-1,3-dione, or a pharmaceutically acceptable salt thereof. In an embodiment, the degradation compound is pomalidomide, e.g., according to the following formula:

[chemical structure]

[0984] In an embodiment, X is O. In an embodiment, R¹ is heterocyclyl (e.g., piperidinyl-2,6-dionyl). In an embodiment, R^{2a} and R^{2b} together with the carbon to which they are attached form a carbonyl group. In an embodiment, n is 0. In an embodiment, the degradation compound comprises thalidomide, e.g., 2-(2,6-dioxopiperidin-3-yl)isoindoline-1,3-dione, or a pharmaceutically acceptable salt thereof. In an embodiment, the degradation product is thalidomide, e.g., according to the following formula:

[chemical structure]

[0985] In an embodiment, X is O. In an embodiment, R¹ is heterocyclyl (e.g., piperidine-2,6-dionyl). In an embodiment, each of R^{2a} and R^{2b} is independently hydrogen. In an embodiment, n is 1. In an embodiment, R¹⁰ is C₁-C₆ heteroalkyl (e.g., CH₂NHC(O)CH₂-phenyl-t-butyl). In an embodiment, the degradation compound comprises 2-(4-(tert-butyl)phenyl)-N-((2-(2,6-dioxopiperidin-3-yl)-1-oxoisoindolin-5-yl)methyl)acetamide, or a pharmaceutically acceptable salt thereof. In an embodiment, the degradation compound has the structure as shown in the following formula:

[chemical structure]

[0986] In some embodiments, the degradation compound (e.g., a compound of Formula (II)) is not attached to a linker or attachment group. In some embodiments, the degradation compound (e.g., a compound of Formula (II)) does not comprise another moiety, e.g., a ligand, a targeting agent, or a moiety capable of dimerization. In some embodiments, R¹⁰ is not L-Tag.

[0987] In some embodiments, the degradation compound (e.g., a compound of Formula (II)) is attached to a linker or attachment group (e.g., at least one R¹⁰ is L-Tag). In some embodiments, the degradation compound (e.g., a compound of Formula (II)) comprises another moiety, e.g., a ligand, a targeting agent, or a moiety capable of dimerization. In some embodiments, R¹⁰ is L-Tag, and L is alkyl or heteroalkyl (e.g., a PEG chain). In some embodiments, L is a linker selected from a linker disclosed in International Patent Publication No. WO2017/024318 (e.g., FIGS. 28-31).

[0988] In some embodiments, R¹⁰ is L-Tag, and Tag is a targeting moiety that is capable of binding or is bound to a target protein. A Tag may comprise a small molecule compound or an amino acid sequence (e.g., a peptide or polypeptide). In some embodiments, the Tag is a kinase inhibitor, a BET bromodomain-containing protein inhibitor, cytosolic signaling protein FKBP12 ligand, an HDAC inhibitor, a lysine methyltransferase inhibitor, an angiogenesis inhibitor, an immunosuppressive compound, or an aryl hydrocarbon receptor (AHR) inhibitor.

[0989] In certain embodiments, the Tag is a SERM (selective estrogen receptor modulator) or SERD (selective estrogen receptor degrader). Non-limiting examples of SERMs and SERDs are provided in International Patent Publication Nos. WO2014/191726, WO2013/090921, WO2014/203129, WO2014/205136, WO2014/205138, and WO 2014/203132; U.S. Patent Publication Nos. US2013/0178445 and US 2015/0005286; and U.S. Pat. Nos. 9,078,871, 8,853,423, and 8,703,810.

[0990] Additional Tags include, for example, any moiety which binds to an endogenous protein (binds to a target protein). Exemplary Tags include Hsp90 inhibitors, kinase inhibitors, HDM2 and MDM2 inhibitors, compounds targeting human BET bromodomain-containing proteins, HDAC inhibitors, human lysine methyltransferase inhibitors, angiogenesis inhibitors, nuclear hormone receptor compounds, immunosuppressive compounds, and compounds targeting the aryl hydrocarbon receptor (AHR), among numerous others. Such small molecule Tags also include pharmaceutically acceptable salts, enantiomers, solvates and polymorphs of these compositions, as well as other small molecules that may bind to a target protein of interest.

[0991] In an embodiment, the Tag is an Ubc9 SUMO E2 ligase 5F6D targeting ligand, e.g., as described in Hewitt, W. M., et. al. (2016) Angew. Chem. Int. Ed. Engl. 55: 5703-5707

[0992] In an embodiment, the Tag is a Tank1 targeting ligand, e.g., as described in Kirby, C. A. et al, (2012) Acta Crystallogr. Sect. F 68: 115-118; and Shultz, M. D., et al. (2013) J. Med. Chem. 56: 7049-7059.

[0993] In an embodiment, the Tag is an SH2 domain of pp60 Src targeting ligand, e.g., as described in Gudrun Lange, et al., (2003) J. Med. Chem. 46, 5184-5195.

[0994] In an embodiment, the Tag is a Sec7 domain targeting ligand, e.g., as described in Huta, B. P., et al., (2016) Chemmed chem 11: 277.

[0995] In an embodiment, the Tag is a Saposin-B targeting ligand, e.g., as described in I. Nemcovicova and D. M. Zajonc Acta Cryst. (2014). D70, 851-862.

[0996] In an embodiment, the Tag is a protein S100-A7 2OWS targeting ligand, e.g., as described in Leon, R., Murray, et al., (2009) Biochemistry 48: 10591-10600.

[0997] In an embodiment, the Tag is a Phospholipase A2 targeting ligand, e.g., as described in Schevitz, R. W., et al., (1995) Nat. Struct. Biol. 2, 458-465.

[0998] In an embodiment, the Tag is a PHIP targeting ligand, e.g., as described in Krojer, T.; et al. Chem. Sci. 2016, 7, 2322-2330.

[0999] In an embodiment, the Tag is a PDZ targeting ligand, e.g., as described in Mangesh Joshi, et al. Angew. Chem. Int. Ed. (2006) 45, 3790-3795.

[1000] In an embodiment, the Tag is a PARP15 targeting ligand, e.g., as described in Karlberg, T., et al., (2015) J. Biol. Chem. 290: 7336-7344.

[1001] In an embodiment, the Tag is a PARP14 targeting ligand, e.g., as described in Andersson, C. D., et al., (2012) J. Med. Chem. 55: 7706-7718; Wahlberg, E., et al. (2012) Nat. Biotechnol. 30: 283-288; Andersson, C. D., et al. (2012) J. Med. Chem. 55: 7706-7718.

[1002] In an embodiment, the Tag is a MTH1 targeting ligand, e.g., as described in Helge Gad, et. al. Nature, (2014) 508, 215-221.

[1003] In an embodiment, the Tag is a mPGES-1 targeting ligand, e.g., as described in Luz, J. G., et al., (2015) J. Med. Chem. 58: 4727-4737.

[1004] In an embodiment, the Tag is a FLAP-5-lipoxygenase-activating protein targeting ligand, e.g., as described Ferguson, A. D., et al (2007) Science 317: 510-512.

[1005] In an embodiment, the Tag is a FA Binding Protein targeting ligand, e.g., as described in Kuhn, B.; et al. J. Med. Chem. (2016) 59, 4087-4102.

[1006] In an embodiment, the Tag is a BCL2 targeting ligand, e.g., as described in Souers, A. J., et al. (2013) Nat Med 19: 202-208.

[1007] In an embodiment, the Tag is any small molecule or protein which can bind to a target protein and acted on or degraded by a ubiquitin ligase is a target protein. In some embodiments, the Tag is a dTAG Targeting Ligand disclosed in International Patent Publication No. WO2017/024318 (e.g., Table T, pages 119-129).

[1008] When R¹⁰ is L-Tag, Tag is capable of binding to or is bound to a target protein. Exemplary target proteins include FK506 binding protein-12 (FKBP12), bromodomain-containing protein 4 (BRD4), CREB binding protein (CREBBP), or transcriptional activator BRG1 (SMARCA4). In some embodiments, the target protein comprises a hormone receptor e.g., estrogen-receptor protein, androgen receptor protein, retinoid x receptor (RXR) protein, or dihydrofolate reductase (DHFR), including bacterial DHFR. In some embodiments, the target protein comprises an amino acid sequence derived from a bacterial dehalogenase. In other embodiments, the target protein comprises amino acid sequences derived from 7,8-dihydro-8-oxoguanin triphosphatase, AFAD, Arachidonate 5-lipoxygenase activating protein, apolipoprotein, ASH1L, ATAD2, baculoviral IAP repeat-containing protein 2, BAZ1A, BAZ1B, BAZ2A, BAZ2B, Bcl-2, Bcl-xL, BRD1, BRD2, BRD3, BRD4, BRD5, BRD6, BRD7, BRD8, BRD9, BRD10, BRDT, BRPF1, BRPF3, BRWD3, CD209, CECR2, CREBBP, E3 ligase XIAP, EP300, FALZ, fatty acid binding protein from adipocytes 4 (FABP4), GCN5L2, GTPase k-RAS, HDAC6, hematopoietic prostaglandin D synthase, KIAA1240, lactoylglutathione lyase, LOC93349, Mcl-1, MLL, PA2GA, PB1, PCAF, peptidyl-prolyl cis-trans isomerase NIMA-interacting 1, PHIP, poly-ADP-ribose polymerase 14, poly-ADP-ribose polymerase 15, PRKCBP1, prosaposin, prostaglandin E synthase, retinal rod rhodopsin-sensitive cGMP 3′,′5-cyclic phosphodiesterase subunit delta, S100-A7, SMARCA2, SMARCA4, SP100, SP110, SP140, Src, Sumo-conjugating enzyme UBC9, superoxide dismutase, TAF1, TAF1L, tankyrase 1, tankyrase 2, TIF1a, TRIM28, TRIM33, TRIM66, WDR9, ZMYND11, or MLL4. In other embodiments, the target protein comprises an amino acid sequence derived from MDM2. In some embodiments, the target protein is a dTAG disclosed in International Patent Publication No. WO2017/024318 (e.g., pages 112-114).

[1009] In one embodiment, the target protein is derived from BRD2, BRD3, BRD4, or BRDT. In one embodiment, the target protein is a modified or mutant BRD2, BRD3, BRD4, or BRDT protein. In certain embodiments, the one or more mutations of BRD2 include a mutation of the Tryptophan (W) at amino acid position 97, a mutation of the Valine (V) at amino acid position 103, a mutation of the Leucine (L) at amino acid position 110, a mutation of the W at amino acid position 370, a mutation of the V at amino acid position 376, or a mutation of the L at amino acid position 381.

[1010] In one embodiment, the target protein is derived from cytosolic signaling protein FKBP12. In certain embodiments, the target protein is a modified or mutant cytosolic signaling protein FKBP12. In certain embodiments, the modified or mutant cytosolic signaling protein FKBP12 contains one or more mutations that create an enlarged binding pocket for FKBP12 ligands. In certain embodiments, the one or more mutations include a mutation of the phenylalanine (F) at amino acid position 36 to valine (V) (F36V) (referred to interchangeably herein as FKBP12* or FKBP*).

[1011] In some embodiments, the degradation compound is a compound disclosed in U.S. Pat. Nos. 7,973,057; 8,546,430; 8,716,315; International Patent Publication No. WO2017/059062; or International Patent Publication No. WO2017/024318; each of which is hereby incorporated by reference in its entirety.

### Heterologous Polypeptides

[1012] Provided herein are fusion polypeptides including a COF1/CRBN-, COF2/CRBN-, or COF3/CRBN-binding polypeptide and a heterologous polypeptide of interest. In some embodiments, the COF1/CRBN-, COF2/CRBN-, or COF3/CRBN-binding polypeptide and the heterologous polypeptide are separated by a linker (e.g., a glycine-serine linker). In some embodiments, the fusion polypeptide described herein comprises three elements: a COF1/CRBN-, COF2/CRBN-, or COF3/CRBN-binding polypeptide (e.g., a portion of an amino acid sequence of a degron as described herein), a heterologous polypeptide, and a linker separating the COF1/CRBN-, COF2/CRBN-, or COF3/CRBN-binding polypeptide and the heterologous polypeptide. In other embodiments, the fusion polypeptide described herein comprises two elements: a COF1/CRBN-, COF2/CRBN-, or COF3/CRBN-binding polypeptide (e.g., a portion of an amino acid sequence of a degron, e.g., as described herein) linked directly to a heterologous polypeptide. These elements can be arranged such that the COF1/CRBN-, COF2/CRBN-, or COF3/CRBN-binding polypeptide (e.g., a portion of an amino acid sequence of a degron, e.g., as described herein) is located at the N-terminus of the heterologous polypeptide of interest, at the C-terminus of the heterologous polypeptide of interest, or in the middle of the heterologous polypeptide of interest. In one embodiment, the heterologous polypeptide is a cytosolic and/or nuclear protein and the COF1/CRBN-, COF2/CRBN-, or COF3/CRBN-binding polypeptide is located N-terminal to the heterologous polypeptide. In one embodiment, the heterologous polypeptide is a transmembrane protein and the COF1/CRBN-, COF2/CRBN-, or COF3/CRBN-binding polypeptide is located C-terminal to the heterologous polypeptide.

[1013] In some embodiments, the fusion polypeptide further comprises a degradation domain. In some embodiments, the degradation domain is separated from the COF1/CRBN-, COF2/CRBN-, or COF3/CRBN-binding polypeptide and the heterologous polypeptide by a heterologous protease cleavage site.

[1014] The fusion polypeptides disclosed herein can include any heterologous polypeptide of interest. In some embodiments, the heterologous polypeptide can be a transmembrane protein (e.g., a transmembrane receptor). In certain embodiments, the heterologous polypeptide of interest can be, e.g., an ion channel-linked receptor, an enzyme-linked receptor (e.g., receptor tyrosine kinase, a tyrosine kinase associated receptor, a receptor-like tyrosine phosphatase, a receptor serine/threonine kinase; a receptor guanylyl cyclase, and a histidine kinase associated receptor), or a G protein coupled receptor. In some embodiments, the transmembrane protein is a chimeric antigen receptor, e.g., as described herein.

[1015] In another embodiment, the heterologous polypeptide is a secreted protein (e.g., a small secreted protein). In some embodiments, the heterologous polypeptide can be, e.g., an antibody, a nanobody, or a protein binding molecule in cell manufacturing. In some embodiments, the heterologous polypeptide can be a therapeutic or clinical protein (e.g., insulin, growth hormone, erythropoietin, or a therapeutic antibody). In certain embodiments, the protein can be toxic to a cell for manufacturing (e.g., bacterial toxins and proteases).

[1016] Table 2 includes a list of exemplary heterologous polypeptide for use in the fusion polypeptides disclosed herein. Additional heterologous polypeptide of interest include Chimeric Antigen T Cell Receptors as described in the section below.

TABLE 2
Heterologous Polypeptides of Interest

| Cytoplasmic or Nuclear | Transmembrane | Secreted |
|---|---|---|
| Apoptosis pathway | CD62E | IL-12 p35 |
| (e.g., Caspase 9) | | |
| TALENs | CCR1 | IL-12 p40 |
| ZFN | CCR2 | IL-12 p70 |
| Meganuclease | CCR5 | IL-15 or IL-15 complex |
| Cas9 | CCR7 | IL-2 |
| MITF | CCR10 | IL-7 |
| MYC | CXCR2 | IL-18 |
| STAT3 | CXCR3 | IL-9 |
| STAT5 | CXCR4 | IL-21 |
| NF-kappaB | CXCR6 | RANTES/CCL5 |
| Beta-catenin | CTLA4 | CCL2 |
| Notch | PD1 | CCL1 |
| GLI | BTLA | CCL22 |
| c-JUN | VISTA | Heparanase |
| Tet methylcytosine | CD137L | matrix metalloproteinase (MMP) |
| dioxygenase 2 (TET2) | | |
| FKBP | CD80 | Cathepsin |
| Tau | CD86 | Antibody (e.g., anti-tumor antibody, e.g., |
| | | Herceptin, or a checkpoint inhibitor antibody, |
| | | e.g., anti-PD1 antibody) |
| Enzyme | TIGIT | Peptide |
| | | (e.g., anti-tumor peptide, or protein hormone) |
| Scaffold protein | Chimeric Antigen | IL-6 inhibitory peptide |
| | Receptor (e.g., CAR | |
| | that binds to CD19, | |
| | CD22, CD20, | |
| | BCMA, CD123, | |
| | CD33, EGFRvIII, or | |
| | Mesothelin) | |
| | CD3 | TGFbeta inhibitory peptide |
| | CD8 | |
| | CD19 | |
| | CD22 | |
| | CD20 | |
| | BCMA | |

### CAR Antigen Binding Domain

[1017] In one aspect, the CAR of the disclosure linked to a COF1/CRBN-, COF2/CRBN-, or COF3/CRBN-binding polypeptide and/or a degradation domain comprises a target-specific binding element otherwise referred to as an antigen binding domain. In one embodiment, the portion of the CAR comprising the antigen binding domain comprises an antigen binding domain that targets, e.g., specifically binds to, an antigen, e.g., antigen described herein, e.g., CD19. In one embodiment, the antigen binding domain targets, e.g., specifically binds to, human CD19.

[1018] In some embodiments, the heterologous polypeptide linked to a COF1/CRBN-, COF2/CRBN-, or COF3/CRBN-binding polypeptide and/or a degradation domain comprises a chimeric antigen receptor (CAR). In some embodiments, the CAR comprises an antigen binding domain (e.g., an antibody or antibody fragment, a TCR, or a TCR fragment) that binds to a tumor antigen, a transmembrane domain, and an intracellular signaling domain (e.g., an intracellular signaling domain comprising a costimulatory domain) and/or a primary signaling domain. CAR nucleic acid constructs, encoded proteins, containing vectors, host cells, pharmaceutical compositions, and methods of administration and treatment related to the present disclosure are disclosed in detail in International Patent Application Publication No. WO2015142675, which is incorporated by reference in its entirety.

[1019] In some embodiments, the heterologous polypeptide is a chimeric antigen receptor (CAR), wherein the CAR comprises an antigen binding domain (e.g., antibody or antibody fragment, TCR or TCR fragment) that binds to a tumor-supporting antigen (e.g., a tumor-supporting antigen as described herein), a transmembrane domain (e.g., a transmembrane domain described herein), and an intracellular signaling domain (e.g., an intracellular signaling domain described herein) (e.g., an intracellular signaling domain comprising a costimulatory domain (e.g., a costimulatory domain described herein) and/or a primary signaling domain (e.g., a primary signaling domain described herein). In some embodiments, the tumor-supporting antigen is an antigen present on a stromal cell or a myeloid-derived suppressor cell (MDSC). In other aspects, the invention features polypeptides encoded by such nucleic acids and host cells containing such nucleic acids and/or polypeptides.

[1020] In some embodiments, a CAR molecule comprises at least one intracellular signaling domain selected from a CD137 (4-1BB) signaling domain, a CD28 signaling domain, a CD27 signaling domain, an ICOS signaling domain, a CD3zeta signal domain, or any combination thereof. In some embodiments, a CAR molecule comprises at least one intracellular signaling domain selected from one or more costimulatory molecule(s) selected from CD137 (4-1BB), CD28, CD27, or ICOS.

[1021] In some embodiments, a plurality of immune effector cells, e.g., the population of T regulatory-depleted cells, include a nucleic acid encoding a CAR that comprises a target-specific binding element otherwise referred to as an antigen binding domain. The choice of binding element depends upon the type and number of ligands that define the surface of a target cell. For example, the antigen binding domain may be chosen to recognize a ligand that acts as a cell surface marker on target cells associated with a particular disease state. Thus, examples of cell surface markers that may act as ligands for the antigen binding domain in a CAR described herein include those associated with viral, bacterial and parasitic infections, autoimmune disease and cancer cells.

[1022] Sequences of non-limiting examples of various components that can be part of a CAR molecule, e.g., a TA CAR or a BCA CAR described herein, are listed in Table 3, where “aa” stands for amino acids, and “na” stands for nucleic acids that encode the corresponding peptide.

TABLE 3
Sequences of various components of CAR (aa - amino acid sequence, na - nucleic acid
sequence).

| SEQ ID NO: | description | Sequence |
|---|---|---|
| SEQ ID NO: | EF-1 | CGTGAGGCTCCGGTGCCCGTCAGTGGGCAGAGCGCACATC |
| 144 | promoter (na) | GCCCACAGTCCCCGAGAAGTTGGGGGGAGGGGTCGGCAAT |
| | | TGAACCGGTGCCTAGAGAAGGTGGCGCGGGGTAAACTGGG |
| | | AAAGTGATGTCGTGTACTGGCTCCGCCTTTTTCCCGAGGGT |
| | | GGGGGAGAACCGTATATAAGTGCAGTAGTCGCCGTGAACG |
| | | TTCTTTTTCGCAACGGGTTTGCCGCCAGAACACAGGTAAGT |
| | | GCCGTGTGTGGTTCCCGCGGGCCTGGCCTCTTTACGGGTTA |
| | | TGGCCCTTGCGTGCCTTGAATTACTTCCACCTGGCTGCAGT |
| | | ACGTGATTCTTGATCCCGAGCTTCGGGTTGGAAGTGGGTGG |
| | | GAGAGTTCGAGGCCTTGCGCTTAAGGAGCCCCTTCGCCTCG |
| | | TGCTTGAGTTGAGGCCTGGCCTGGGCGCTGGGGCCGCCGCG |
| | | TGCGAATCTGGTGGCACCTTCGCGCCTGTCTCGCTGCTTTC |
| | | GATAAGTCTCTAGCCATTTAAAATTTTTGATGACCTGCTGC |
| | | GACGCTTTTTTTCTGGCAAGATAGTCTTGTAAATGCGGGCC |
| | | AAGATCTGCACACTGGTATTTCGGTTTTTGGGGCCGCGGGC |
| | | GGCGACGGGGCCCGTGCGTCCCAGCGCACATGTTCGGCGA |
| | | GGCGGGGCCTGCGAGCGCGGCCACCGAGAATCGGACGGGG |
| | | GTAGTCTCAAGCTGGCCGGCCTGCTCTGGTGCCTGGCCTCG |
| | | CGCCGCCGTGTATCGCCCCGCCCTGGGCGGCAAGGCTGGCC |
| | | CGGTCGGCACCAGTTGCGTGAGCGGAAAGATGGCCGCTTC |
| | | CCGGCCCTGCTGCAGGGAGCTCAAAATGGAGGACGCGGCG |
| | | CTCGGGAGAGCGGGCGGGTGAGTCACCCACACAAAGGAAA |
| | | AGGGCCTTTCCGTCCTCAGCCGTCGCTTCATGTGACTCCAC |
| | | GGAGTACCGGGCGCCGTCCAGGCACCTCGATTAGTTCTCGA |
| | | GCTTTTGGAGTACGTCGTCTTTAGGTTGGGGGGAGGGGTTT |
| | | TATGCGATGGAGTTTCCCCACACTGAGTGGGTGGAGACTGA |
| | | AGTTAGGCCAGCTTGGCACTTGATGTAATTCTCCTTGGAAT |
| | | TTGCCCTTTTTGAGTTTGGATCTTGGTTCATTCTCAAGCCTC |
| | | AGACAGTGGTTCAAAGTTTTTTTCTTCCATTTCAGGTGTCGT |
| | | GA |
| SEQ ID NO: | Leader (aa) | MALPVTALLLPLALLLHAARP |
| 64 | | |
| SEQ ID NO: | Leader (na) | ATGGCCCTGCCTGTGACAGCCCTGCTGCTGCCTCTGGCTCT |
| 145 | | GCTGCTGCATGCCGCTAGACCC |
| SEQ ID NO: | Leader (na) | ATGGCCCTCCCTGTCACCGCCCTGCTGCTTCCGCTGGCTCTT |
| 146 | | CTGCTCCACGCCGCTCGGCCC |
| SEQ ID NO: | CD 8 hinge | TTTPAPRPPTPAPTIASQPLSLRPEACRPAAGGAVHTRGLDFAC |
| 147 | (aa) | D |
| SEQ ID NO: | CD8 hinge | ACCACGACGCCAGCGCCGCGACCACCAACACCGGCGCCCA |
| 148 | (na) | CCATCGCGTCGCAGCCCCTGTCCCTGCGCCCAGAGGCGTGC |
| | | CGGCCAGCGGCGGGGGGCGCAGTGCACACGAGGGGGCTGG |
| | | ACTTCGCCTGTGAT |
| SEQ ID NO: | Ig4 hinge | ESKYGPPCPPCPAPEFLGGPSVFLFPPKPKDTLMISRTPEVTCV |
| 149 | (aa) | VVDVSQEDPEVQFNWYVDGVEVHNAKTKPREEQFNSTYRVV |
| | | SVLTVLHQDWLNGKEYKCKVSNKGLPSSIEKTISKAKGQPREP |
| | | QVYTLPPSQEEMTKNQVSLTCLVKGFYPSDIAVEWESNGQPE |
| | | NNYKTTPPVLDSDGSFFLYSRLTVDKSRWQEGNVFSCSVMHE |
| | | ALHNHYTQKSLSLSLGKM |
| SEQ ID NO: | Ig4 hinge | GAGAGCAAGTACGGCCCTCCCTGCCCCCCTTGCCCTGCCCC |
| 150 | (na) | CGAGTTCCTGGGCGGACCCAGCGTGTTCCTGTTCCCCCCCA |
| | | AGCCCAAGGACACCCTGATGATCAGCCGGACCCCCGAGGT |
| | | GACCTGTGTGGTGGTGGACGTGTCCCAGGAGGACCCCGAG |
| | | GTCCAGTTCAACTGGTACGTGGACGGCGTGGAGGTGCACA |
| | | ACGCCAAGACCAAGCCCCGGGAGGAGCAGTTCAATAGCAC |
| | | CTACCGGGTGGTGTCCGTGCTGACCGTGCTGCACCAGGACT |
| | | GGCTGAACGGCAAGGAATACAAGTGTAAGGTGTCCAACAA |
| | | GGGCCTGCCCAGCAGCATCGAGAAAACCATCAGCAAGGCC |
| | | AAGGGCCAGCCTCGGGAGCCCCAGGTGTACACCCTGCCCC |
| | | CTAGCCAAGAGGAGATGACCAAGAACCAGGTGTCCCTGAC |
| | | CTGCCTGGTGAAGGGCTTCTACCCCAGCGACATCGCCGTGG |
| | | AGTGGGAGAGCAACGGCCAGCCCGAGAACAACTACAAGAC |
| | | CACCCCCCCTGTGCTGGACAGCGACGGCAGCTTCTTCCTGT |
| | | ACAGCCGGCTGACCGTGGACAAGAGCCGGTGGCAGGAGGG |
| | | CAACGTCTTTAGCTGCTCCGTGATGCACGAGGCCCTGCACA |
| | | ACCACTACACCCAGAAGAGCCTGAGCCTGTCCCTGGGCAA |
| | | GATG |
| SEQ ID NO: | IgD hinge | RWPESPKAQASSVPTAQPQAEGSLAKATTAPATTRNTGRGGE |
| 151 | (aa) | EKKKEKEKEEQEERETKTPECPSHTQPLGVYLLTPAVQDLWL |
| | | RDKATFTCFVVGSDLKDAHLTWEVAGKVPTGGVEEGLLERH |
| | | SNGSQSQHSRLTLPRSLWNAGTSVTCTLNHPSLPPQRLMALRE |
| | | PAAQAPVKLSLNLLASSDPPEAASWLLCEVSGFSPPNILLMWL |
| | | EDQREVNTSGFAPARPPPQPGSTTFWAWSVLRVPAPPSPQPAT |
| | | YTCVVSHEDSRTLLNASRSLEVSYVTDH |
| SEQ ID NO: | IgD hinge | AGGTGGCCCGAAAGTCCCAAGGCCCAGGCATCTAGTGTTC |
| 152 | (na) | CTACTGCACAGCCCCAGGCAGAAGGCAGCCTAGCCAAAGC |
| | | TACTACTGCACCTGCCACTACGCGCAATACTGGCCGTGGCG |
| | | GGGAGGAGAAGAAAAAGGAGAAAGAGAAAGAAGAACAG |
| | | GAAGAGAGGGAGACCAAGACCCCTGAATGTCCATCCCATA |
| | | CCCAGCCGCTGGGCGTCTATCTCTTGACTCCCGCAGTACAG |
| | | GACTTGTGGCTTAGAGATAAGGCCACCTTTACATGTTTCGT |
| | | CGTGGGCTCTGACCTGAAGGATGCCCATTTGACTTGGGAGG |
| | | TTGCCGGAAAGGTACCCACAGGGGGGGTTGAGGAAGGGTT |
| | | GCTGGAGCGCCATTCCAATGGCTCTCAGAGCCAGCACTCAA |
| | | GACTCACCCTTCCGAGATCCCTGTGGAACGCCGGGACCTCT |
| | | GTCACATGTACTCTAAATCATCCTAGCCTGCCCCCACAGCG |
| | | TCTGATGGCCCTTAGAGAGCCAGCCGCCCAGGCACCAGTTA |
| | | AGCTTAGCCTGAATCTGCTCGCCAGTAGTGATCCCCCAGAG |
| | | GCCGCCAGCTGGCTCTTATGCGAAGTGTCCGGCTTTAGCCC |
| | | GCCCAACATCTTGCTCATGTGGCTGGAGGACCAGCGAGAA |
| | | GTGAACACCAGCGGCTTCGCTCCAGCCCGGCCCCCACCCCA |
| | | GCCGGGTTCTACCACATTCTGGGCCTGGAGTGTCTTAAGGG |
| | | TCCCAGCACCACCTAGCCCCCAGCCAGCCACATACACCTGT |
| | | GTTGTGTCCCATGAAGATAGCAGGACCCTGCTAAATGCTTC |
| | | TAGGAGTCTGGAGGTTTCCTACGTGACTGACCATT |
| SEQ ID NO: | GS | GGGGSGGGGS |
| 153 | hinge/linker | |
| | (aa) | |
| SEQ ID NO: | GS | GGTGGCGGAGGTTCTGGAGGTGGAGGTTCC |
| 154 | hinge/linker | |
| | (na) | |
| SEQ ID NO: | CD8TM (aa) | IYIWAPLAGTCGVLLLSLVITLYC |
| 155 | | |
| SEQ ID NO: | CD8 TM (na) | ATCTACATCTGGGCGCCCTTGGCCGGGACTTGTGGGGTCCT |
| 156 | | TCTCCTGTCACTGGTTATCACCCTTTACTGC |
| SEQ ID NO: | CD8 TM (na) | ATCTACATTTGGGCCCCTCTGGCTGGTACTTGCGGGGTCCT |
| 157 | | GCTGCTTTCACTCGTGATCACTCTTTACTGT |
| SEQ ID NO: | 4-1BB | KRGRKKLLYIFKQPFMRPVQTTQEEDGCSCRFPEEEEGGCEL |
| 158 | intracellular | |
| | domain (aa) | |
| SEQ ID NO: | 4-1BB | AAACGGGGCAGAAAGAAACTCCTGTATATATTCAAACAAC |
| 159 | intracellular | CATTTATGAGACCAGTACAAACTACTCAAGAGGAAGATGG |
| | domain (na) | CTGTAGCTGCCGATTTCCAGAAGAAGAAGAAGGAGGATGT |
| | | GAACTG |
| SEQ ID NO: | 4-1BB | AAGCGCGGTCGGAAGAAGCTGCTGTACATCTTTAAGCAAC |
| 160 | intracellular | CCTTCATGAGGCCTGTGCAGACTACTCAAGAGGAGGACGG |
| | domain (na) | CTGTTCATGCCGGTTCCCAGAGGAGGAGGAAGGCGGCTGC |
| | | GAACTG |
| SEQ ID NO: | CD27 (aa) | QRRKYRSNKGESPVEPAEPCRYSCPREEEGSTIPIQEDYRKPEP |
| 161 | | ACSP |
| SEQ ID NO: | CD27 (na) | AGGAGTAAGAGGAGCAGGCTCCTGCACAGTGACTACATGA |
| 162 | | ACATGACTCCCCGCCGCCCCGGGCCCACCCGCAAGCATTAC |
| | | CAGCCCTATGCCCCACCACGCGACTTCGCAGCCTATCGCTC |
| | | C |
| SEQ ID NO: | CD3-zeta | RVKFSRSADAPAYKQGQNQLYNELNLGRREEYDVLDKRRGR |
| 163 | (aa) | DPEMGGKPRRKNPQEGLYNELQKDKMAEAYSEIGMKGERRR |
| | | GKGHDGLYQGLSTATKDTYDALHMQALPPR |
| SEQ ID NO: | CD3-zeta | AGAGTGAAGTTCAGCAGGAGCGCAGACGCCCCCGCGTACA |
| 164 | (na) | AGCAGGGCCAGAACCAGCTCTATAACGAGCTCAATCTAGG |
| | | ACGAAGAGAGGAGTACGATGTTTTGGACAAGAGACGTGGC |
| | | CGGGACCCTGAGATGGGGGGAAAGCCGAGAAGGAAGAAC |
| | | CCTCAGGAAGGCCTGTACAATGAACTGCAGAAAGATAAGA |
| | | TGGCGGAGGCCTACAGTGAGATTGGGATGAAAGGCGAGCG |
| | | CCGGAGGGGCAAGGGGCACGATGGCCTTTACCAGGGTCTC |
| | | AGTACAGCCACCAAGGACACCTACGACGCCCTTCACATGC |
| | | AGGCCCTGCCCCCTCGC |
| SEQ ID NO: | CD3-zeta | CGCGTGAAATTCAGCCGCAGCGCAGATGCTCCAGCCTACA |
| 165 | (na) | AGCAGGGGCAGAACCAGCTCTACAACGAACTCAATCTTGG |
| | | TCGGAGAGAGGAGTACGACGTGCTGGACAAGCGGAGAGG |
| | | ACGGGACCCAGAAATGGGCGGGAAGCCGCGCAGAAAGAA |
| | | TCCCCAAGAGGGCCTGTACAACGAGCTCCAAAAGGATAAG |
| | | ATGGCAGAAGCCTATAGCGAGATTGGTATGAAAGGGGAAC |
| | | GCAGAAGAGGCAAAGGCCACGACGGACTGTACCAGGGACT |
| | | CAGCACCGCCACCAAGGACACCTATGACGCTCTTCACATGC |
| | | AGGCCCTGCCGCCTCGG |
| SEQ ID NO: | CD3-zeta | RVKFSRSADAPAYQQGQNQLYNELNLGRREEYDVLDKRRGR |
| 166 | (aa) | DPEMGGKPRRKNPQEGLYNELQKDKMAEAYSEIGMKGERRR |
| | | GKGHDGLYQGLSTATKDTYDALHMQALPPR |
| SEQ ID NO: | CD3-zeta | AGAGTGAAGTTCAGCAGGAGCGCAGACGCCCCCGCGTACC |
| 167 | (na) | AGCAGGGCCAGAACCAGCTCTATAACGAGCTCAATCTAGG |
| | | ACGAAGAGAGGAGTACGATGTTTTGGACAAGAGACGTGGC |
| | | CGGGACCCTGAGATGGGGGGAAAGCCGAGAAGGAAGAAC |
| | | CCTCAGGAAGGCCTGTACAATGAACTGCAGAAAGATAAGA |
| | | TGGCGGAGGCCTACAGTGAGATTGGGATGAAAGGCGAGCG |
| | | CCGGAGGGGCAAGGGGCACGATGGCCTTTACCAGGGTCTC |
| | | AGTACAGCCACCAAGGACACCTACGACGCCCTTCACATGC |
| | | AGGCCCTGCCCCCTCGC |
| SEQ ID NO: | Linker (aa) | GGGGS |
| 168 | | |
| SEQ ID NO: | Linker (aa) | GGTGGCGGAGGTTCTGGAGGTGGAGGTTCC |
| 154 | | |
| SEQ ID NO: | PD-1 | Pgwfldspdrpwnpptfspallvvtegdnatftcsfsntsesfylnwyrmspsnqtdklaafpe |
| 169 | extracellular | drsqpgqdcrfrvtqlpngrdfhmsvvrarrndsgtylcgaislapkaqikeslraelrvterrae |
| | domain (aa) | vptahpspsprpagqfqtlv |
| SEQ ID NO: | PD-1 | Cccggatggtttctggactctccggatcgcccgtggaatcccccaaccttctcaccggcactcttg |
| 170 | extracellular | gttgtgactgagggcgataatgcgaccttcacgtgctcgttctccaacacctccgaatcattcgtgct |
| | domain (na) | gaactggtaccgcatgagcccgtcaaaccagaccgacaagctcgccgcgtttccggaagatcgg |
| | | tcgcaaccgggacaggattgtcggttccgcgtgactcaactgccgaatggcagagacttccacat |
| | | gagcgtggtccgcgctaggcgaaacgactccgggacctacctgtgcggagccatctcgctggcg |
| | | cctaaggcccaaatcaaagagagcttgagggccgaactgagagtgaccgagcgcagagctgag |
| | | gtgccaactgcacatccatccccatcgcctcggcctgcggggcagtttcagaccctggtc |
| SEQ ID NO: | PD-1 CAR | Malpvtalllplalllhaarppgwfldspdrpwnpptfspallvvtegdnatftcsfsntsesfvln |
| 171 | (aa) with | wyrmspsnqtdklaafpedrsqpgqdcrfrvtqlpngrdfhmsvvrarrndsgtylcgaislap |
| | signal | kaqikeslraelrvterraevptahpspsprpagqfqtlvtttpaprpptpaptiasqplslrpeacr |
| | | paaggavhtrgldfacdiyiwaplagtcgvlllslvitlyckrgrkkllyiflcqpfmrpvqttqee |
| | | dgcscrfpeeeeggcelrvkfsrsadapaykqgqnqlynelnlgrreeydvldkrrgrdpemg |
| | | gkprrknpqeglynelqkdkmaeayseigmkgerrrgkghdglyqglstatkdtydalhmq |
| | | alppr |
| SEQ ID NO: | PD-1 CAR | Atggccctccctgtcactgccctgcttctccccctcgcactcctgctccacgccgctagaccaccc |
| 172 | (na) | ggatggtttctggactctccggatcgcccgtggaatcccccaaccttctcaccggcactcttggttgt |
| | | gactgagggcgataatgcgaccttcacgtgctcgttctccaacacctccgaatcattcgtgctgaac |
| | | tggtaccgcatgagcccgtcaaaccagaccgacaagctcgccgcgtttccggaagatcggtcgc |
| | | aaccgggacaggattgtcggttccgcgtgactcaactgccgaatggcagagacttccacatgagc |
| | | gtggtccgcgctaggcgaaacgactccgggacctacctgtgcggagccatctcgctggcgccta |
| | | aggcccaaatcaaagagagcttgagggccgaactgagagtgaccgagcgcagagctgaggtg |
| | | ccaactgcacatccatccccatcgcctcggcctgcggggcagtttcagaccctggtcacgaccac |
| | | tccggcgccgcgcccaccgactccggccccaactatcgcgagccagcccctgtcgctgaggcc |
| | | ggaagcatgccgccctgccgccggaggtgctgtgcatacccggggattggacttcgcatgcgac |
| | | atctacatttgggctcctctcgccggaacttgtggcgtgctccttctgtccctggtcatcaccctgtac |
| | | tgcaagcggggtcggaaaaagcttctgtacattttcaagcagcccttcatgaggcccgtgcaaacc |
| | | acccaggaggaggacggttgctcctgccggttccccgaagaggaagaaggaggttgcgagctg |
| | | cgcgtgaagttctcccggagcgccgacgcccccgcctataagcagggccagaaccagctgtac |
| | | aacgaactgaacctgggacggcgggaagagtacgatgtgctggacaagcggcgcggccggga |
| | | ccccgaaatgggcgggaagcctagaagaaagaaccctcaggaaggcctgtataacgagctgca |
| | | gaaggacaagatggccgaggcctactccgaaattgggatgaagggagagcggcggaggggaa |
| | | aggggcacgacggcctgtaccaaggactgtccaccgccaccaaggacacatacgatgccctgc |
| | | acatgcaggcccttccccctcgc |
| SEQ ID NO: | Linker (aa) | (Gly-Gly-Gly-Ser)n, where n = 1-10 |
| 173 | | |
| SEQ ID NO: | Linker (aa) | (Gly4 Ser)4 |
| 141 | | |
| SEQ ID NO: | Linker (aa) | (Gly4 Ser)3 |
| 142 | | |
| SEQ ID NO: | Linker (aa) | (Gly3Ser) |
| 143 | | |
| SEQ ID NO: | polyA (na) | [a]₅₀₋₅₀₀₀ |
| 174 | | |
| SEQ ID NO: | PD1 CAR | Pgwfldspdrpwnpptfspallvvtegdnatftcsfsntsesfvlnwyrmspsnqtdklaafpe |
| 175 | (aa) | drsqpgqdcrfrvtqlpngrdfhmsvvrarrndsgtylcgaislapkaqikeslraelrvterrae |
| | | vptahpspsprpagqfqtlvtttpaprpptpaptiasqplslrpeacrpaaggavhtrgldfacdiy |
| | | iwaplagtcgvlllslvitlyckrgrkkllyifkqpfmrpvqttqeedgcscrfpeeeeggcelrv |
| | | kfsrsadapaykqgqnqlynelnlgrreeydvldkrrgrdpemggkprrknpqeglynelqk |
| | | dkmaeayseigmkgerrrgkghdglyqglstatkdtydalhmqalppr |
| SEQ ID NO: | ICOS | TKKKYSSSVHDPNGEYMFMRAVNTAKKSRLTDVTL |
| 176 | intracellular | |
| | domain (aa) | |
| SEQ ID NO: | ICOS | ACAAAAAAGAAGTATTCATCCAGTGTGCACGACCCTAACG |
| 177 | intracellular | GTGAATACATGTTCATGAGAGCAGTGAACACAGCCAAAAA |
| | domain (na) | ATCCAGACTCACAGATGTGACCCTA |
| SEQ ID NO: | ICOS TM | TTTPAPRPPTPAPTIASQPLSLRPEACRPAAGGAVHTRGLDFAC |
| 178 | domain (aa) | DFWLPIGCAAFVVVCILGCILICWL |
| SEQ ID NO: | ICOS TM | ACCACGACGCCAGCGCCGCGACCACCAACACCGGCGCCCA |
| 179 | domain (na) | CCATCGCGTCGCAGCCCCTGTCCCTGCGCCCAGAGGCGTGC |
| | | CGGCCAGCGGCGGGGGGCGCAGTGCACACGAGGGGGCTGG |
| | | ACTTCGCCTGTGATTTCTGGTTACCCATAGGATGTGCAGCC |
| | | TTTGTTGTAGTCTGCATTTTGGGATGCATACTTATTTGTTGG |
| | | CTT |
| SEQ ID NO: | CD28 | RSKRSRLLHSDYMNMTPRRPGPTRKHYQPYAPPRDFAAYRS |
| 180 | intracellular | |
| | domain (aa) | |
| SEQ ID NO: | CD28 | AGGAGTAAGAGGAGCAGGCTCCTGCACAGTGACTACATGA |
| 162 | intracellular | ACATGACTCCCCGCCGCCCCGGGCCCACCCGCAAGCATTAC |
| | domain (na) | CAGCCCTATGCCCCACCACGCGACTTCGCAGCCTATCGCTC |
| | | C |

TABLE 4
CAR modified with degadation tag and/or FurON

| SEQ ID | | |
|---|---|---|
| NO | Description | Amino acid sequences (signal peptide included) |
| SEQ ID | Signal peptide (aa) | MALPVTALLLPLALLLHAARP |
| NO: 64 | | |
| SEQ ID | Modified signal | MALPVTALLLPLALLLHAARPRSSLA |
| NO: 140 | peptide (aa) | |
| SEQ ID | 16GS linker (aa) | GGGGSGGGGTGGGGSG |
| NO: 28 | | |
| SEQ ID | 16KGS linker (aa) | KGGGSKGGGTKGGGSK |
| NO: 99 | | |
| SEQ ID | CAR19 (aa) | MALPVTALLLPLALLLHAARPEIVMTQSPATLSLSPGERATL |
| NO: 29 | | SCRASQDISKYLNWYQQKPGQAPRLLIYHTSRLHSGIPARFS |
| | | GSGSGTDYTLTISSLQPEDFAVYFCQQGNTLPYTFGQGTKLE |
| | | IKGGGGSGGGGSGGGGSQVQLQESGPGLVKPSETLSLTCTV |
| | | SGVSLPDYGVSWIRQPPGKGLEWIGVIWGSETTYYQSSLKS |
| | | RVTISKDNSKNQVSLKLSSVTAADTAVYYCAKHYYYGGSY |
| | | AMDYWGQGTLVTVSSTTTPAPRPPTPAPTIASQPLSLRPEAC |
| | | RPAAGGAVHTRGLDFACDIYIWAPLAGTCGVLLLSLVITLY |
| | | CKRGRKKLLYIFKQPFMRPVQTTQEEDGCSCRFPEEEEGGC |
| | | ELRVKFSRSADAPAYQQGQNQLYNELNLGRREEYDVLDKR |
| | | RGRDPEMGGKPRRKNPQEGLYNELQKDKMAEAYSEIGMK |
| | | GERRRGKGHDGLYQGLSTATKDTYDALHMQALPPR |
| SEQ ID | FurON_CAR19 | MALPVTALLLPLALLLHAARPRSSLALSLTADQMVSALLDA |
| NO: 92 | (construct 765)(aa) | EPPILYSEYDPTRPFSEASMMGLLTNLADRELVHMINWAKR |
| | | VPGFVDLALHDQVHLLECAWMEILMIGLVWRSMEHPGKLL |
| | | FAPNLLLDRNQGKCVEGGVEIFDMLLATSSRFRMMNLQGE |
| | | EFVCLKSIILLNSGVYTFLSSTLKSLEEKDHIHRVLDKITDTLI |
| | | HLMAKAGLTLQQQHQRLAQLLLILSHIRHMSSKRMEHLYS |
| | | MKCKNVVPLSDLLLEMLDAHRLGTGAEDPRPSRKRRSLGD |
| | | VGEIVMTQSPATLSLSPGERATLSCRASQDISKYLNWYQQK |
| | | PGQAPRLLIYHTSRLHSGIPARFSGSGSGTDYTLTISSLQPEDF |
| | | AVYFCQQGNTLPYTFGQGTKLEIKGGGGSGGGGSGGGGSQ |
| | | VQLQESGPGLVKPSETLSLTCTVSGVSLPDYGVSWIRQPPGK |
| | | GLEWIGVIWGSETTYYQSSLKSRVTISKDNSKNQVSLKLSSV |
| | | TAADTAVYYCAKHYYYGGSYAMDYWGQGTLVTVSSTTTP |
| | | APRPPTPAPTIASQPLSLRPEACRPAAGGAVHTRGLDFACDI |
| | | YIWAPLAGTCGVLLLSLVITLYCKRGRKKLLYIFKQPFMRPV |
| | | QTTQEEDGCSCRFPEEEEGGCELRVKFSRSADAPAYQQGQN |
| | | QLYNELNLGRREEYDVLDKRRGRDPEMGGKPRRKNPQEGL |
| | | YNELQKDKMAEAYSEIGMKGERRRGKGHDGLYQGLSTAT |
| | | KDTYDALHMQALPPR |
| SEQ ID | FurON_CAR19_16 | MALPVTALLLPLALLLHAARPRSSLALSLTADQMVSALLDA |
| NO: 93 | GS_HilD tag_V5 | EPPILYSEYDPTRPFSEASMMGLLTNLADRELVHMINWAKR |
| | (construct 766)(aa) | VPGFVDLALHDQVHLLECAWMEILMIGLVWRSMEHPGKLL |
| | | FAPNLLLDRNQGKCVEGGVEIFDMLLATSSRFRMMNLQGE |
| | | EFVCLKSIILLNSGVYTFLSSTLKSLEEKDHIHRVLDKITDTLI |
| | | HLMAKAGLTLQQQHQRLAQLLLILSHIRHMSSKRMEHLYS |
| | | MKCKNVVPLSDLLLEMLDAHRLGTGAEDPRPSRKRRSLGD |
| | | VGEIVMTQSPATLSLSPGERATLSCRASQDISKYLNWYQQK |
| | | PGQAPRLLIYHTSRLHSGIPARFSGSGSGTDYTLTISSLQPEDF |
| | | AVYFCQQGNTLPYTFGQGTKLEIKGGGGSGGGGSGGGGSQ |
| | | VQLQESGPGLVKPSETLSLTCTVSGVSLPDYGVSWIRQPPGK |
| | | GLEWIGVIWGSETTYYQSSLKSRVTISKDNSKNQVSLKLSSV |
| | | TAADTAVYYCAKHYYYGGSYAMDYWGQGTLVTVSSTTTP |
| | | APRPPTPAPTIASQPLSLRPEACRPAAGGAVHTRGLDFACDI |
| | | YIWAPLAGTCGVLLLSLVITLYCKRGRKKLLYIFKQPFMRPV |
| | | QTTQEEDGCSCRFPEEEEGGCELRVKFSRSADAPAYQQGQN |
| | | QLYNELNLGRREEYDVLDKRRGRDPEMGGKPRRKNPQEGL |
| | | YNELQKDKMAEAYSEIGMKGERRRGKGHDGLYQGLSTAT |
| | | KDTYDALHMQALPPRGGGGSGGGGTGGGGSGMHKRSHTG |
| | | ERPFQCNQCGASFTQKGNLLRHIKLHTGEKPFKCHLCNTAS |
| | | AEARHIKAEMGGKPIPNPLLGLDST |
| SEQ ID | FurON_CAR19_16 | MALPVTALLLPLALLLHAARPRSSLALSLTADQMVSALLDA |
| NO: 32 | GS_HilD tag | EPPILYSEYDPTRPFSEASMMGLLTNLADRELVHMINWAKR |
| | (construct 767)(aa) | VPGFVDLALHDQVHLLECAWMEILMIGLVWRSMEHPGKLL |
| | | FAPNLLLDRNQGKCVEGGVEIFDMLLATSSRFRMMNLQGE |
| | | EFVCLKSIILLNSGVYTFLSSTLKSLEEKDHIHRVLDKITDTLI |
| | | HLMAKAGLTLQQQHQRLAQLLLILSHIRHMSSKRMEHLYS |
| | | MKCKNVVPLSDLLLEMLDAHRLGTGAEDPRPSRKRRSLGD |
| | | VGEIVMTQSPATLSLSPGERATLSCRASQDISKYLNWYQQK |
| | | PGQAPRLLIYHTSRLHSGIPARFSGSGSGTDYTLTISSLQPEDF |
| | | AVYFCQQGNTLPYTFGQGTKLEIKGGGGSGGGGSGGGGSQ |
| | | VQLQESGPGLVKPSETLSLTCTVSGVSLPDYGVSWIRQPPGK |
| | | GLEWIGVIWGSETTYYQSSLKSRVTISKDNSKNQVSLKLSSV |
| | | TAADTAVYYCAKHYYYGGSYAMDYWGQGTLVTVSSTTTP |
| | | APRPPTPAPTIASQPLSLRPEACRPAAGGAVHTRGLDFACDI |
| | | YIWAPLAGTCGVLLLSLVITLYCKRGRKKLLYIFKQPFMRPV |
| | | QTTQEEDGCSCRFPEEEEGGCELRVKFSRSADAPAYQQGQN |
| | | QLYNELNLGRREEYDVLDKRRGRDPEMGGKPRRKNPQEGL |
| | | YNELQKDKMAEAYSEIGMKGERRRGKGHDGLYQGLSTAT |
| | | KDTYDALHMQALPPRGGGGSGGGGTGGGGSGMHKRSHTG |
| | | ERPFQCNQCGASFTQKGNLLRHIKLHTGEKPFKCHLCNTAS |
| | | AEARHIKAEMG |
| SEQ ID | FurON_CAR19_16 | MALPVTALLLPLALLLHAARPRSSLALSLTADQMVSALLDA |
| NO: 33 | GS_HilD tag_NoK | EPPILYSEYDPTRPFSEASMMGLLTNLADRELVHMINWAKR |
| | (aa) | VPGFVDLALHDQVHLLECAWMEILMIGLVWRSMEHPGKLL |
| | | FAPNLLLDRNQGKCVEGGVEIFDMLLATSSRFRMMNLQGE |
| | | EFVCLKSIILLNSGVYTFLSSTLKSLEEKDHIHRVLDKITDTLI |
| | | HLMAKAGLTLQQQHQRLAQLLLILSHIRHMSSKRMEHLYS |
| | | MKCKNVVPLSDLLLEMLDAHRLGTGAEDPRPSRKRRSLGD |
| | | VGEIVMTQSPATLSLSPGERATLSCRASQDISKYLNWYQQK |
| | | PGQAPRLLIYHTSRLHSGIPARFSGSGSGTDYTLTISSLQPEDF |
| | | AVYFCQQGNTLPYTFGQGTKLEIKGGGGSGGGGSGGGGSQ |
| | | VQLQESGPGLVKPSETLSLTCTVSGVSLPDYGVSWIRQPPGK |
| | | GLEWIGVIWGSETTYYQSSLKSRVTISKDNSKNQVSLKLSSV |
| | | TAADTAVYYCAKHYYYGGSYAMDYWGQGTLVTVSSTTTP |
| | | APRPPTPAPTIASQPLSLRPEACRPAAGGAVHTRGLDFACDI |
| | | YIWAPLAGTCGVLLLSLVITLYCKRGRKKLLYIFKQPFMRPV |
| | | QTTQEEDGCSCRFPEEEEGGCELRVKFSRSADAPAYQQGQN |
| | | QLYNELNLGRREEYDVLDKRRGRDPEMGGKPRRKNPQEGL |
| | | YNELQKDKMAEAYSEIGMKGERRRGKGHDGLYQGLSTAT |
| | | KDTYDALHMQALPPRGGGGSGGGGTGGGGSGMHRRSHTG |
| | | ERPFQCNQCGASFTQRGNLLRHIRLHTGERPFRCHLCNTASA |
| | | EARHIRAEMG |
| SEQ ID | CAR19_16GS_HilD | MALPVTALLLPLALLLHAARPEIVMTQSPATLSLSPGERATL |
| NO: 94 | tag_V5 (construct | SCRASQDISKYLNWYQQKPGQAPRLLIYHTSRLHSGIPARFS |
| | 768)(aa) | GSGSGTDYTLTISSLQPEDFAVYFCQQGNTLPYTFGQGTKLE |
| | | IKGGGGSGGGGSGGGGSQVQLQESGPGLVKPSETLSLTCTV |
| | | SGVSLPDYGVSWIRQPPGKGLEWIGVIWGSETTYYQSSLKS |
| | | RVTISKDNSKNQVSLKLSSVTAADTAVYYCAKHYYYGGSY |
| | | AMDYWGQGTLVTVSSTTTPAPRPPTPAPTIASQPLSLRPEAC |
| | | RPAAGGAVHTRGLDFACDIYIWAPLAGTCGVLLLSLVITLY |
| | | CKRGRKKLLYIFKQPFMRPVQTTQEEDGCSCRFPEEEEGGC |
| | | ELRVKFSRSADAPAYQQGQNQLYNELNLGRREEYDVLDKR |
| | | RGRDPEMGGKPRRKNPQEGLYNELQKDKMAEAYSEIGMK |
| | | GERRRGKGHDGLYQGLSTATKDTYDALHMQALPPRGGGG |
| | | SGGGGTGGGGSGMHKRSHTGERPFQCNQCGASFTQKGNLL |
| | | RHIKLHTGEKPFKCHLCNTASAEARHIKAEMGGKPIPNPLLG |
| | | LDST |
| SEQ ID | CAR19_16GS_HilD | MALPVTALLLPLALLLHAARPEIVMTQSPATLSLSPGERATL |
| NO: 30 | tag (construct 769) | SCRASQDISKYLNWYQQKPGQAPRLLIYHTSRLHSGIPARFS |
| | (aa) | GSGSGTDYTLTISSLQPEDFAVYFCQQGNTLPYTFGQGTKLE |
| | | IKGGGGSGGGGSGGGGSQVQLQESGPGLVKPSETLSLTCTV |
| | | SGVSLPDYGVSWIRQPPGKGLEWIGVIWGSETTYYQSSLKS |
| | | RVTISKDNSKNQVSLKLSSVTAADTAVYYCAKHYYYGGSY |
| | | AMDYWGQGTLVTVSSTTTPAPRPPTPAPTIASQPLSLRPEAC |
| | | RPAAGGAVHTRGLDFACDIYIWAPLAGTCGVLLLSLVITLY |
| | | CKRGRKKLLYIFKQPFMRPVQTTQEEDGCSCRFPEEEEGGC |
| | | ELRVKFSRSADAPAYQQGQNQLYNELNLGRREEYDVLDKR |
| | | RGRDPEMGGKPRRKNPQEGLYNELQKDKMAEAYSEIGMK |
| | | GERRRGKGHDGLYQGLSTATKDTYDALHMQALPPRGGGG |
| | | SGGGGTGGGGSGMHKRSHTGERPFQCNQCGASFTQKGNLL |
| | | RHIKLHTGEKPFKCHLCNTASAEARHIKAEMG |
| SEQ ID | CAR19_16GS_HilD | MALPVTALLLPLALLLHAARPEIVMTQSPATLSLSPGERATL |
| NO: 31 | tag_NoK (construct | SCRASQDISKYLNWYQQKPGQAPRLLIYHTSRLHSGIPARFS |
| | 770)(aa) | GSGSGTDYTLTISSLQPEDFAVYFCQQGNTLPYTFGQGTKLE |
| | | IKGGGGSGGGGSGGGGSQVQLQESGPGLVKPSETLSLTCTV |
| | | SGVSLPDYGVSWIRQPPGKGLEWIGVIWGSETTYYQSSLKS |
| | | RVTISKDNSKNQVSLKLSSVTAADTAVYYCAKHYYYGGSY |
| | | AMDYWGQGTLVTVSSTTTPAPRPPTPAPTIASQPLSLRPEAC |
| | | RPAAGGAVHTRGLDFACDIYIWAPLAGTCGVLLLSLVITLY |
| | | CKRGRKKLLYIFKQPFMRPVQTTQEEDGCSCRFPEEEEGGC |
| | | ELRVKFSRSADAPAYQQGQNQLYNELNLGRREEYDVLDKR |
| | | RGRDPEMGGKPRRKNPQEGLYNELQKDKMAEAYSEIGMK |
| | | GERRRGKGHDGLYQGLSTATKDTYDALHMQALPPRGGGG |
| | | SGGGGTGGGGSGMHRRSHTGERPFQCNQCGASFTQRGNLL |
| | | RHIRLHTGERPFRCHLCNTASAEARHIRAEMG |
| SEQ ID | CAR19_HilD | MALPVTALLLPLALLLHAARPEIVMTQSPATLSLSPGERATL |
| NO: 95 | tag_V5 (construct | SCRASQDISKYLNWYQQKPGQAPRLLIYHTSRLHSGIPARFS |
| | 771)(aa) | GSGSGTDYTLTISSLQPEDFAVYFCQQGNTLPYTFGQGTKLE |
| | | IKGGGGSGGGGSGGGGSQVQLQESGPGLVKPSETLSLTCTV |
| | | SGVSLPDYGVSWIRQPPGKGLEWIGVIWGSETTYYQSSLKS |
| | | RVTISKDNSKNQVSLKLSSVTAADTAVYYCAKHYYYGGSY |
| | | AMDYWGQGTLVTVSSTTTPAPRPPTPAPTIASQPLSLRPEAC |
| | | RPAAGGAVHTRGLDFACDIYIWAPLAGTCGVLLLSLVITLY |
| | | CKRGRKKLLYIFKQPFMRPVQTTQEEDGCSCRFPEEEEGGC |
| | | ELRVKFSRSADAPAYQQGQNQLYNELNLGRREEYDVLDKR |
| | | RGRDPEMGGKPRRKNPQEGLYNELQKDKMAEAYSEIGMK |
| | | GERRRGKGHDGLYQGLSTATKDTYDALHMQALPPRMHKR |
| | | SHTGERPFQCNQCGASFTQKGNLLRHIKLHTGEKPFKCHLC |
| | | NTASAEARHIKAEMGGKPIPNPLLGLDST |
| SEQ ID | CAR19_16KGS_Hil | MALPVTALLLPLALLLHAARPEIVMTQSPATLSLSPGERATL |
| NO: 96 | D tag_V5 (construct | SCRASQDISKYLNWYQQKPGQAPRLLIYHTSRLHSGIPARFS |
| | 6761)(aa) | GSGSGTDYTLTISSLQPEDFAVYFCQQGNTLPYTFGQGTKLE |
| | | IKGGGGSGGGGSGGGGSQVQLQESGPGLVKPSETLSLTCTV |
| | | SGVSLPDYGVSWIRQPPGKGLEWIGVIWGSETTYYQSSLKS |
| | | RVTISKDNSKNQVSLKLSSVTAADTAVYYCAKHYYYGGSY |
| | | AMDYWGQGTLVTVSSTTTPAPRPPTPAPTIASQPLSLRPEAC |
| | | RPAAGGAVHTRGLDFACDIYIWAPLAGTCGVLLLSLVITLY |
| | | CKRGRKKLLYIFKQPFMRPVQTTQEEDGCSCRFPEEEEGGC |
| | | ELRVKFSRSADAPAYQQGQNQLYNELNLGRREEYDVLDKR |
| | | RGRDPEMGGKPRRKNPQEGLYNELQKDKMAEAYSEIGMK |
| | | GERRRGKGHDGLYQGLSTATKDTYDALHMQALPPRKGGG |
| | | SKGGGTKGGGSKMHKRSHTGERPFQCNQCGASFTQKGNLL |
| | | RHIKLHTGEKPFKCHLCNTASAEARHIKAEMGGKPIPNPLLG |
| | | LDST |
| SEQ ID | HilD | MALPVTALLLPLALLLHAARPRSSLAHKRSHTGERPFQCNQ |
| NO: 97 | tag_CAR19_modSig | CGASFTQKGNLLRHIKLHTGEKPFKCHLCNTASAEARHIKA |
| | Pep (construct 773) | EMGGTGAEDPRPSRKRRSLGDVGEIVMTQSPATLSLSPGER |
| | (aa) | ATLSCRASQDISKYLNWYQQKPGQAPRLLIYHTSRLHSGIPA |
| | | RFSGSGSGTDYTLTISSLQPEDFAVYFCQQGNTLPYTFGQGT |
| | | KLEIKGGGGSGGGGSGGGGSQVQLQESGPGLVKPSETLSLT |
| | | CTVSGVSLPDYGVSWIRQPPGKGLEWIGVIWGSETTYYQSS |
| | | LKSRVTISKDNSKNQVSLKLSSVTAADTAVYYCAKHYYYG |
| | | GSYAMDYWGQGTLVTVSSTTTPAPRPPTPAPTIASQPLSLRP |
| | | EACRPAAGGAVHTRGLDFACDIYIWAPLAGTCGVLLLSLVI |
| | | TLYCKRGRKKLLYIFKQPFMRPVQTTQEEDGCSCRFPEEEEG |
| | | GCELRVKFSRSADAPAYQQGQNQLYNELNLGRREEYDVLD |
| | | KRRGRDPEMGGKPRRKNPQEGLYNELQKDKMAEAYSEIG |
| | | [sequence omitted] |
| SEQ ID | HilD tag_CAR19 | MALPVTALLLPLALLLHAARPHKRSHTGERPFQCNQCGASF |
| NO: 98 | (construct 774)(aa) | TQKGNLLRHIKLHTGEKPFKCHLCNTASAEARHIKAEMGGT |
| | | GAEDPRPSRKRRSLGDVGEIVMTQSPATLSLSPGERATLSCR |
| | | ASQDISKYLNWYQQKPGQAPRLLIYHTSRLHSGIPARFSGSG |
| | | SGTDYTLTISSLQPEDFAVYFCQQGNTLPYTFGQGTKLEIKG |
| | | GGGSGGGGSGGGGSQVQLQESGPGLVKPSETLSLTCTVSGV |
| | | SLPDYGVSWIRQPPGKGLEWIGVIWGSETTYYQSSLKSRVTI |
| | | SKDNSKNQVSLKLSSVTAADTAVYYCAKHYYYGGSYAMD |
| | | YWGQGTLVTVSSTTTPAPRPPTPAPTIASQPLSLRPEACRPA |
| | | AGGAVHTRGLDFACDIYIWAPLAGTCGVLLLSLVITLYCKR |
| | | GRKKLLYIFKQPFMRPVQTTQEEDGCSCRFPEEEEGGCELRV |
| | | KFSRSADAPAYQQGQNQLYNELNLGRREEYDVLDKRRGRD |
| | | PEMGGKPRRKNPQEGLYNELQKDKMAEAYSEIGMKGERRR |
| | | GKGHDGLYQGLSTATKDTYDALHMQALPPR |
| SEQ ID | CAR19-16GS- | MALPVTALLLPLALLLHAARPEIVMTQSPATLSLSPGERATL |
| NO: 112 | CARBtag (aa) | SCRASQDISKYLNWYQQKPGQAPRLLIYHTSRLHSGIPARFS |
| | | GSGSGTDYTLTISSLQPEDFAVYFCQQGNTLPYTFGQGTKLE |
| | | IKGGGGSGGGGSGGGGSQVQLQESGPGLVKPSETLSLTCTV |
| | | SGVSLPDYGVSWIRQPPGKGLEWIGVIWGSETTYYQSSLKS |
| | | RVTISKDNSKNQVSLKLSSVTAADTAVYYCAKHYYYGGSY |
| | | AMDYWGQGTLVTVSSTTTPAPRPPTPAPTIASQPLSLRPEAC |
| | | RPAAGGAVHTRGLDFACDIYIWAPLAGTCGVLLLSLVITLY |
| | | CKRGRKKLLYIFKQPFMRPVQTTQEEDGCSCRFPEEEEGGC |
| | | ELRVKFSRSADAPAYQQGQNQLYNELNLGRREEYDVLDKR |
| | | RGRDPEMGGKPRRKNPQEGLYNELQKDKMAEAYSEIGMK |
| | | GERRRGKGHDGLYQGLSTATKDTYDALHMQALPPRGGGG |
| | | SGGGGTGGGGSGHKRSHTGERPFHCNQCGASFTQKGNLLR |
| | | HIKLHSGEKPFKCPFCSAGQVMSHHVPPMED |
| SEQ ID | BCMA CAR-16GS | MALPVTALLLPLALLLHAARPEVQLVESGGGLVQPGGSLRL |
| NO: | linker-HilD (aa) | SCAVSGFALSNHGMSWVRRAPGKGLEWVSGIVYSGSTYYA |
| 1450 | | ASVKGRFTISRDNSRNTLYLQMNSLRPEDTAIYYCSAHGGES |
| | | DVWGQGTTVTVSSASGGGGSGGRASGGGGSDIQLTQSPSSL |
| | | SASVGDRVTITCRASQSISSYLNWYQQKPGKAPKLLIYAASS |
| | | LQSGVPSRFSGSGSGTDFTLTISSLQPEDFATYYCQQSYSTPY |
| | | TFGQGTKVEIKTTTPAPRPPTPAPTIASQPLSLRPEACRPAAG |
| | | GAVHTRGLDFACDIYIWAPLAGTCGVLLLSLVITLYCKRGR |
| | | KKLLYIFKQPFMRPVQTTQEEDGCSCRFPEEEEGGCELRVKF |
| | | SRSADAPAYQQGQNQLYNELNLGRREEYDVLDKRRGRDPE |
| | | MGGKPRRKNPQEGLYNELQKDKMAEAYSEIGMKGERRRG |
| | | KGHDGLYQGLSTATKDTYDALHMQALPPRGGGGSGGGGT |
| | | GGGGSGMHKRSHTGERPFQCNQCGASFTQKGNLLRHIKLH |
| | | TGEKPFKCHLCNTASAEARHIKAEMG |
| SEQ ID | | MALEK |
| NO: 837 | | |

[1023] In one aspect, an exemplary CAR constructs comprise an optional leader sequence (e.g., a leader sequence described herein), an extracellular antigen binding domain (e.g., an antigen binding domain described herein), a hinge (e.g., a hinge region described herein), a transmembrane domain (e.g., a transmembrane domain described herein), and an intracellular stimulatory domain (e.g., an intracellular stimulatory domain described herein). In one aspect, an exemplary CAR construct comprises an optional leader sequence (e.g., a leader sequence described herein), an extracellular antigen binding domain (e.g., an antigen binding domain described herein), a hinge (e.g., a hinge region described herein), a transmembrane domain (e.g., a transmembrane domain described herein), an intracellular costimulatory signaling domain (e.g., a costimulatory signaling domain described herein) and/or an intracellular primary signaling domain (e.g., a primary signaling domain described herein).

[1024] In one aspect, the CARs (e.g., CD19 CARs) of the invention comprise at least one intracellular signaling domain selected from the group of a CD137 (4-11B1) signaling domain, a CD28 signaling domain, a CD27 signaling domain, an ICOS signaling domain, a CD3zeta signal domain, and any combination thereof. In one aspect, the CARs comprise at least one intracellular signaling domain is from one or more costimulatory molecule(s) selected from CD137 (4-11B1), CD28, CD27, or ICOS.

### CAR Antigen Binding Domain

[1025] In one aspect, the CAR of the disclosure linked to a COF1/CRBN-, COF2/CRBN-, or COF3/CRBN-binding polypeptide, and/or a degradation domain comprises a target-specific binding element otherwise referred to as an antigen binding domain. In one embodiment, the portion of the CAR comprising the antigen binding domain comprises an antigen binding domain that targets, e.g., specifically binds to, an antigen, e.g., antigen described herein, e.g., CD19. In one embodiment, the antigen binding domain targets, e.g., specifically binds to, human CD19.

[1026] In some embodiments, a plurality of immune effector cells, e.g., the population of T regulatory-depleted cells, include a nucleic acid encoding a CAR that comprises a target-specific binding element otherwise referred to as an antigen binding domain. The choice of binding element depends upon the type and number of ligands that define the surface of a target cell. For example, the antigen binding domain may be chosen to recognize a ligand that acts as a cell surface marker on target cells associated with a particular disease state. Thus, examples of cell surface markers that may act as ligands for the antigen binding domain in a CAR described herein include those associated with viral, bacterial and parasitic infections, autoimmune disease and cancer cells.

[1027] In one aspect, the portion of the CAR comprising the antigen binding domain comprises an antigen binding domain that targets a tumor antigen, e.g., a tumor antigen described herein. In some embodiments, the antigen binding domain is chosen from: CD19; CD123; CD22; CD30; CD171; CS-1; C-type lectin-like molecule-1, CD33; epidermal growth factor receptor variant III (EGFRvIII); ganglioside G2 (GD2); ganglioside GD3; TNF receptor family member; B-cell maturation antigen (BCMA); Tn antigen ((Tn Ag) or (GalNAcα-Ser/Thr)); prostate-specific membrane antigen (PSMA); Receptor tyrosine kinase-like orphan receptor 1 (ROR1); Fms-Like Tyrosine Kinase 3 (FLT3); Tumor-associated glycoprotein 72 (TAG72); CD38; CD44v6; Carcinoembryonic antigen (CEA); Epithelial cell adhesion molecule (EPCAM); B7H3 (CD276); KIT (CD117); Interleukin-13 receptor subunit alpha-2; Mesothelin; Interleukin 11 receptor alpha (IL-11Ra); prostate stem cell antigen (PSCA); Protease Serine 21; vascular endothelial growth factor receptor 2 (VEGFR2); Lewis(Y) antigen; CD24; Platelet-derived growth factor receptor beta (PDGFR-beta); Stage-specific embryonic antigen-4 (SSEA-4); CD20; Folate receptor alpha; Receptor tyrosine-protein kinase ERBB2 (Her2/neu); Mucin 1, cell surface associated (MUC1); epidermal growth factor receptor (EGFR); neural cell adhesion molecule (NCAM); Prostase; prostatic acid phosphatase (PAP); elongation factor 2 mutated (ELF2M); Ephrin B2; fibroblast activation protein alpha (FAP); insulin-like growth factor 1 receptor (IGF-I receptor), carbonic anhydrase IX (CAIX); Proteasome (Prosome, Macropain) Subunit, Beta Type, 9 (LMP2); glycoprotein 100 (gp100); oncogene fusion protein consisting of breakpoint cluster region (BCR) and Abelson murine leukemia viral oncogene homolog 1 (Ab1) (bcr-ab1); tyrosinase; ephrin type-A receptor 2 (EphA2); Fucosyl GM1; sialyl Lewis adhesion molecule (sLe); ganglioside GM3; transglutaminase 5 (TGS5); high molecular weight-melanoma-associated antigen (HMWMAA); o-acetyl-GD2 ganglioside (OAcGD2); Folate receptor beta; tumor endothelial marker 1 (TEM1/CD248); tumor endothelial marker 7-related (TEM7R); claudin 6 (CLDN6); thyroid stimulating hormone receptor (TSHR); G protein-coupled receptor class C group 5, member D (GPRC5D); chromosome X open reading frame 61 (CXORF61); CD97; CD179a; anaplastic lymphoma kinase (ALK); Polysialic acid; placenta-specific 1 (PLAC1); hexasaccharide portion of globoH glycoceramide (GloboH); mammary gland differentiation antigen (NY-BR-1); uroplakin 2 (UPK2); Hepatitis A virus cellular receptor 1 (HAVCR1); adrenoceptor beta 3 (ADRB3); pannexin 3 (PANX3); G protein-coupled receptor 20 (GPR20); lymphocyte antigen 6 complex, locus K 9 (LY6K); Olfactory receptor 51E2 (OR51E2); TCR Gamma Alternate Reading Frame Protein (TARP); Wilms tumor protein (WT1); Cancer/testis antigen 1 (NY-ESO-1); Cancer/testis antigen 2 (LAGE-1a); Melanoma-associated antigen 1 (MAGE-A1); ETS translocation-variant gene 6, located on chromosome 12p (ETV6-AML); sperm protein 17 (SPA17); X Antigen Family, Member 1A (XAGE1); angiopoietin-binding cell surface receptor 2 (Tie 2); melanoma cancer testis antigen-1 (MAD-CT-1); melanoma cancer testis antigen-2 (MAD-CT-2); Fos-related antigen 1; tumor protein p53 (p53); p53 mutant; prostein; surviving; telomerase; prostate carcinoma tumor antigen-1, melanoma antigen recognized by T cells 1; Rat sarcoma (Ras) mutant; human Telomerase reverse transcriptase (hTERT); sarcoma translocation breakpoints; melanoma inhibitor of apoptosis (ML-IAP); ERG (transmembrane protease, serine 2 (TMPRSS2) ETS fusion gene); N-Acetyl glucosaminyl-transferase V (NA17); paired box protein Pax-3 (PAX3); Androgen receptor; Cyclin B1; v-myc avian myelocytomatosis viral oncogene neuroblastoma derived homolog (MYCN); Ras Homolog Family Member C (RhoC); Tyrosinase-related protein 2 (TRP-2); Cytochrome P450 1B1 (CYP1B1); CCCTC-Binding Factor (Zinc Finger Protein)-Like, Squamous Cell Carcinoma Antigen Recognized By T Cells 3 (SART3); Paired box protein Pax-5 (PAX5); proacrosin binding protein sp32 (OY-TES1); lymphocyte-specific protein tyrosine kinase (LCK); A kinase anchor protein 4 (AKAP-4); synovial sarcoma, X breakpoint 2 (SSX2); Receptor for Advanced Glycation Endproducts (RAGE-1); renal ubiquitous 1 (RU1); renal ubiquitous 2 (RU2); legumain; human papilloma virus E6 (HPV E6); human papilloma virus E7 (HPV E7); intestinal carboxyl esterase; heat shock protein 70-2 mutated (mut hsp70-2); CD79a; CD79b; CD72; Leukocyte-associated immunoglobulin-like receptor 1 (LAIR1); Fc fragment of IgA receptor (FCAR or CD89); Leukocyte immunoglobulin-like receptor subfamily A member 2 (LILRA2); CD300 molecule-like family member f (CD300LF); C-type lectin domain family 12 member A (CLEC12A); bone marrow stromal cell antigen 2 (BST2); EGF-like module-containing mucin-like hormone receptor-like 2 (EMR2); lymphocyte antigen 75 (LY75); Glypican-3 (GPC3); Fc receptor-like 5 (FCRL5); and immunoglobulin lambda-like polypeptide 1 (IGLL1).

[1028] In one embodiment, the antigen binding domain binds to CD19. In another embodiment, the antigen binding domain binds to CD123. In another embodiment, the antigen binding domain binds to BCMA. In another embodiment, the antigen binding domain binds to CD20.

[1029] The antigen binding domain can be any domain that binds to the antigen including but not limited to a monoclonal antibody, a polyclonal antibody, a recombinant antibody, a human antibody, a humanized antibody, and a functional fragment thereof, including but not limited to a single-domain antibody such as a heavy chain variable domain (VH), a light chain variable domain (VL) and a variable domain (VHH) of camelid derived nanobody, and to an alternative scaffold known in the art to function as antigen binding domain, such as a recombinant fibronectin domain, a T cell receptor (TCR), or a fragment there of, e.g., single chain TCR, and the like. In some instances, it is beneficial for the antigen binding domain to be derived from the same species in which the CAR will ultimately be used in. For example, for use in humans, it may be beneficial for the antigen binding domain of the CAR to comprise human or humanized residues for the antigen binding domain of an antibody or antibody fragment.

[1030] The antigen binding domain can be any domain that binds to the antigen including but not limited to a monoclonal antibody, a polyclonal antibody, a recombinant antibody, a human antibody, a humanized antibody, and a functional fragment thereof, including but not limited to a single-domain antibody such as a heavy chain variable domain (VH), a light chain variable domain (VL) and a variable domain (VHH) of camelid derived nanobody, and to an alternative scaffold known in the art to function as an antigen binding domain, such as a recombinant fibronectin domain, and the like. In some instances, it is beneficial for the antigen binding domain to be derived from the same species in which the CAR will ultimately be used in. For example, for use in humans, it may be beneficial for the antigen binding domain of the CAR to comprise human or humanized residues for the antigen binding domain of an antibody or antibody fragment. Thus, in one aspect, the antigen binding domain comprises a human antibody or an antibody fragment.

[1031] In one embodiment, the antigen binding domain comprises one, two, or three (e.g., all three) heavy chain CDRs, HC CDR1, HC CDR2 and HC CDR3, from an antibody described herein (e.g., an antibody described in WO2015/142675, US-2015-0283178-A1, US-2016-0046724-A1, US2014/0322212A1, US2016/0068601A1, US2016/0051651A1, US2016/0096892A1, US2014/0322275A1, or WO2015/090230, incorporated herein by reference), and/or one, two, or three (e.g., all three) light chain CDRs, LC CDR1, LC CDR2 and LC CDR3, from an antibody described herein (e.g., an antibody described in WO2015/142675, US-2015-0283178-A1, US-2016-0046724-A1, US2014/0322212A1, US2016/0068601A1, US2016/0051651A1, US2016/0096892A1, US2014/0322275A1, or WO2015/090230, incorporated herein by reference). In one embodiment, the antigen binding domain comprises a heavy chain variable region and/or a variable light chain region of an antibody listed above.

[1032] In embodiments, the antigen binding domain is an antigen binding domain described in WO2015/142675, US-2015-0283178-A1, US-2016-0046724-A1, US2014/0322212A1, US2016/0068601A1, US2016/0051651A1, US2016/0096892A1, US2014/0322275A1, or WO2015/090230, incorporated herein by reference.

[1033] Exemplary target antigens that can be targeted using the CAR-expressing cells, include, but are not limited to, CD19, CD123, EGFRvIII, CD33, mesothelin, BCMA, and GFR ALPHA-4, among others, as described in, for example, WO2014/153270, WO 2014/130635, WO2016/028896, WO 2014/130657, WO2016/014576, WO 2015/090230, WO2016/014565, WO2016/014535, and WO2016/025880, each of which is herein incorporated by reference in its entirety.

### Multispecific CAR

[1034] In some embodiments, the CAR molecule is a multispecific, e.g., bispecific, CAR molecule having a first binding specificity for a first antigen, e.g., a B-cell epitope, and a second binding specificity for the same or a different antigen, e.g., a B cell epitope. In some embodiments, the bispecific CAR molecule has a first binding specificity for CD19 (e.g., the bispecific CAR molecule comprises an anti-CD19 CAR disclosed in Tables 5, 6, 7 and 30) and a second binding specificity for CD22 (e.g., the bispecific CAR molecule comprises an anti-CD22 CAR disclosed in Tables 19 and 20). In some embodiments, the bispecific CAR molecule has a first binding specificity for CD19 (e.g., the bispecific CAR molecule comprises an anti-CD19 CAR disclosed in Tables 5, 6, 7 and 30) and a second binding specificity for CD20 (e.g., the bispecific CAR molecule comprises an anti-CD20 CAR disclosed in Table 32).

[1035] In one embodiment, the first and second binding specificity is an antibody molecule, e.g., an antibody binding domain (e.g., a scFv). Within each antibody molecule (e.g., scFv) of a bispecific CAR molecule, the VH can be upstream or downstream of the VL.

[1036] In some embodiments, the upstream antibody or antibody fragment (e.g., scFv) is arranged with its VH (VH₁) upstream of its VL (VL₁) and the downstream antibody or antibody fragment (e.g., scFv) is arranged with its VL (VL₂) upstream of its VH (VH₂), such that the overall bispecific CAR molecule has the arrangement VH₁-VL₁-VL₂-VH₂, from an N- to C-terminal orientation.

[1037] In some embodiments, the upstream antibody or antibody fragment (e.g., scFv) is arranged with its VL (VL₁) upstream of its VH (VH₁) and the downstream antibody or antibody fragment (e.g., scFv) is arranged with its VH (VH₂) upstream of its VL (VL₂), such that the overall bispecific CAR molecule has the arrangement VL₁-VH₁—VH₂—VL₂, from an N- to C-terminal orientation.

[1038] In some embodiments, the upstream antibody or antibody fragment (e.g., scFv) is arranged with its VL (VL₁) upstream of its VH (VH₁) and the downstream antibody or antibody fragment (e.g., scFv) is arranged with its VL (VL₂) upstream of its VH (VH₂), such that the overall bispecific CAR molecule has the arrangement VL₁-VH₁—VL₂-VH₂, from an N- to C-terminal orientation.

[1039] In yet some embodiments, the upstream antibody or antibody fragment (e.g., scFv) is arranged with its VH (VH₁) upstream of its VL (VL₁) and the downstream antibody or antibody fragment (e.g., scFv) is arranged with its VH (VH₂) upstream of its VL (VL₂), such that the overall bispecific CAR molecule has the arrangement VH₁—VL₁-VH₂—VL₂, from an N- to C-terminal orientation.

[1040] In any of the aforesaid configurations, optionally, a linker is disposed between the two antibodies or antibody fragments (e.g., scFvs), e.g., between VL₁ and VL₂ if the construct is arranged as VH₁-VL₁-VL₂-VH₂; between VH₁ and VH₂ if the construct is arranged as VL₁-VH₁-VH₂-VL₂; between VH₁ and VL₂ if the construct is arranged as VL₁-VH₁—VL₂-VH₂; or between VL₁ and VH₂ if the construct is arranged as VH₁—VL₁-VH₂—VL₂. In general, the linker between the two scFvs should be long enough to avoid mispairing between the domains of the two scFvs. The linker may be a linker as described herein. In some embodiments, the linker is a (Gly₄-Ser)ₙ linker, wherein n is 1, 2, 3, 4, 5, or 6. In some embodiments, the linker is (Gly₄-Ser)ₙ, wherein n=1 (SEQ ID NO: 168), e.g., the linker has the amino acid sequence Gly₄-Ser (SEQ ID NO: 168). In some embodiments, the linker is (Gly4-Ser)ₙ, wherein n=3 (SEQ ID NO: 142). In some embodiments, the linker is (Gly4-Ser)ₙ, wherein n=4 (SEQ ID NO: 141). In some embodiments, the linker comprises, e.g., consists of, the amino acid sequence: LAEAAAK (SEQ ID NO: 822).

[1041] In any of the aforesaid configurations, optionally, a linker is disposed between the VL and VH of the first scFv. Optionally, a linker is disposed between the VL and VH of the second scFv. In constructs that have multiple linkers, any two or more of the linkers can be the same or different. Accordingly, in some embodiments, a bispecific CAR comprises VLs, VHs, and optionally one or more linkers in an arrangement as described herein.

[1042] In some embodiments, each antibody molecule, e.g., each antigen binding domain (e.g., each scFv) comprises a linker between the VH and the VL regions. In some embodiments, the linker between the VH and the VL regions is a (Gly₄-Ser)ₙ linker, wherein n is 1, 2, 3, 4, 5, or 6. In some embodiments, the linker is (Gly₄-Ser)ₙ, wherein n=1 (SEQ ID NO: 168), e.g., the linker has the amino acid sequence Gly₄-Ser (SEQ ID NO: 168). In some embodiments, the linker is (Gly₄-Ser)ₙ, wherein n=3 (SEQ ID NO: 142). In some embodiments, the linker is (Gly₄-Ser)ₙ, wherein n=4 (SEQ ID NO: 141). In some embodiments, the VH and VL regions are connected without a linker.

[1043] Additional exemplary multispecific CAR molecules are disclosed on pages 26-39 of WO2018/067992, herein incorporated by reference.

### CD19 CAR

[1044] In other embodiments, the CAR-expressing cells can specifically bind to CD19, e.g., can include a CAR molecule, or an antigen binding domain (e.g., a humanized antigen binding domain) according to Table 3 of WO2014/153270, incorporated herein by reference.

[1045] In embodiments, the CAR molecule comprises an antigen binding domain that binds specifically to CD19 (CD19 CAR). In one embodiment, the antigen binding domain targets human CD19. In one embodiment, the antigen binding domain of the CAR has the same or a similar binding specificity as the FMC63 scFv fragment described in Nicholson et al. Mol. Immun. 34 (16-17): 1157-1165 (1997). In one embodiment, the antigen binding domain of the CAR includes the scFv fragment described in Nicholson et al. Mol. Immun. 34 (16-17): 1157-1165 (1997). A CD19 antibody molecule can be, e.g., an antibody molecule (e.g., a humanized anti-CD19 antibody molecule) described in WO2014/153270, which is incorporated herein by reference in its entirety. WO2014/153270 also describes methods of assaying the binding and efficacy of various CAR constructs.

[1046] In one aspect, the parental murine scFv sequence is the CAR19 construct provided in PCT publication WO2012/079000 (incorporated herein by reference). In one embodiment, the anti-CD19 binding domain is a scFv described in WO2012/079000.

[1047] In one embodiment, the CAR molecule comprises the fusion polypeptide sequence provided as SEQ ID NO: 12 in PCT publication WO2012/079000, and provided herein in Table 5, which provides an scFv fragment of murine origin that specifically binds to human CD19. Humanization of this mouse scFv may be desired for the clinical setting, where the mouse-specific residues may induce a human-anti-mouse antigen (HAMA) response in patients who receive CART19 treatment, e.g., treatment with T cells transduced with the CAR19 construct.

[1048] In one embodiment, the CD19 CAR comprises an amino acid sequence provided as SEQ ID NO: 12 in PCT publication WO2012/079000. In embodiment, the amino acid sequence is

(SEQ ID NO: 181)
(MALPVTALLLPLALLLHAARP)diqmtqttsslsaslgdrvtiscra
sqdiskylnwyqqkpdgtvklliyhtsrlhsgvpsrfsgsgsgtdysl
tisnleqediatyfcqqgntlpytfgggtkleitggggsggggsgggg
sevklqesgpglvapsqslsvtctvsgvslpdygvswirqpprkglew
lgviwgsettyynsalksrltiikdnsksqvflkmnslqtddtaiyyc
akhyyyggsyamdywgqgtsvtvsstttpaprpptpaptiasqplslr
peacrpaaggavhtrgldfacdiyiwaplagtcgvlllslvitlyckr
grkkllyifkqpfmrpvqttqeedgcscrfpeeeeggcelrvkfsrsa
dapaykqgqnqlynelnlgrreeydvldkrrgrdpemggkprrknpqe
glynelqkdkmaeayseigmkgerrrgkghdglyqglstatkdtydal
hmqalppr,

or a sequence substantially homologous thereto. The optional sequence of the signal peptide is shown in capital letters and parenthesis.

[1049] In one embodiment, the amino acid sequence is:

(SEQ ID NO: 182)
Diqmtqttsslsaslgdrvtiscrasqdiskylnwyqqkpdgtvklliyh
tsrlhsgvpsrfsgsgsgtdysltisnleqediatyfcqqgntlpytfgg
gtkleitggggsggggsggggsevklqesgpglvapsqslsvtctvsgvs
lpdygvswirqpprkglewlgviwgsettyynsalksrltiikdnsksqv
flkmnslqtddtaiyycakhyyyggsyamdywgqgtsvtvsstttpaprp
ptpaptiasqplslrpeacrpaaggavhtrgldfacdiyiwaplagtcgv
lllslvitlyckrgrkkllyifkqpfmrpvqttqeedgcscrfpeeeegg
celrvkfsrsadapaykqgqnqlynelnlgrreeydvldkrrgrdpemgg
kprrknpqeglynelqkdkmaeayseigmkgeragkghdglyqglstatk
dtydalhmqalppr,

or a sequence substantially homologous thereto.

[1050] In one embodiment, the CD19 CAR has the USAN designation TISAGENLECLEUCEL-T. In embodiments, CTL019 is made by a gene modification of T cells is mediated by stable insertion via transduction with a self-inactivating, replication deficient Lentiviral (LV) vector containing the CTL019 transgene under the control of the EF-1 alpha promoter. CTL019 can be a mixture of transgene positive and negative T cells that are delivered to the subject on the basis of percent transgene positive T cells.

[1051] In other embodiments, the CD19 CAR comprises an antigen binding domain (e.g., a humanized antigen binding domain) according to Table 3 of WO2014/153270, incorporated herein by reference.

[1052] Humanization of murine CD19 antibody is desired for the clinical setting, where the mouse-specific residues may induce a human-anti-mouse antigen (HAMA) response in patients who receive CART19 treatment, i.e., treatment with T cells transduced with the CAR19 construct. The production, characterization, and efficacy of humanized CD19 CAR sequences is described in International Application WO2014/153270 which is herein incorporated by reference in its entirety, including Examples 1-5 (p. 115-159).

[1053] In some embodiments, CD19 CAR constructs are described in PCT publication WO 2012/079000, incorporated herein by reference, and the amino acid sequence of the murine CD19 CAR and scFv constructs are shown in Table 5 below, or a sequence substantially identical to any of the aforesaid sequences (e.g., at least 85%, 90%, 95% or more identical to any of the sequences described herein).

TABLE 5
CD19 CAR Constructs

| | | |
|---|---|---|
| SEQ ID NO | Region | Sequence |

CTL019

| | | |
|---|---|---|
| SEQ ID NO: | CTL019 Full | MALPVTALLLPLALLLHAARPDIQMTQTTSSLSASLGDRV |
| 183 | amino acid | TISCRASQDISKYLNWYQQKPDGTVKLLIYHTSRLHSGVPS |
| | sequence | RFSGSGSGTDYSLTISNLEQEDIATYFCQQGNTLPYTFGGG |
| | | TKLEITGGGGSGGGGSGGGGSEVKLQESGPGLVAPSQSLS |
| | | VTCTVSGVSLPDYGVSWIRQPPRKGLEWLGVIWGSETTYY |
| | | NSALKSRLTIIKDNSKSQVFLKMNSLQTDDTAIYYCAKHY |
| | | YYGGSYAMDYWGQGTSVTVSSTTTPAPRPPTPAPTIASQP |
| | | LSLRPEACRPAAGGAVHTRGLDFACDIYIWAPLAGTCGVL |
| | | LLSLVITLYCKRGRKKLLYIFKQPFMRPVQTTQEEDGCSCR |
| | | FPEEEEGGCELRVKFSRSADAPAYKQGQNQLYNELNLGRR |
| | | EEYDVLDKRRGRDPEMGGKPRRKNPQEGLYNELQKDKM |
| | | AEAYSEIGMKGERRRGKGHDGLYQGLSTATKDTYDALH |
| | | MQALPPR |
| SEQ ID NO: | CTL019 Full | ATGGCCTTACCAGTGACCGCCTTGCTCCTGCCGCTGGCC |
| 184 | nucleotide | TTGCTGCTCCACGCCGCCAGGCCGGACATCCAGATGAC |
| | sequence | ACAGACTACATCCTCCCTGTCTGCCTCTCTGGGAGACAG |
| | | AGTCACCATCAGTTGCAGGGCAAGTCAGGACATTAGTA |
| | | AATATTTAAATTGGTATCAGCAGAAACCAGATGGAACT |
| | | GTTAAACTCCTGATCTACCATACATCAAGATTACACTCA |
| | | GGAGTCCCATCAAGGTTCAGTGGCAGTGGGTCTGGAAC |
| | | AGATTATTCTCTCACCATTAGCAACCTGGAGCAAGAAG |
| | | ATATTGCCACTTACTTTTGCCAACAGGGTAATACGCTTC |
| | | CGTACACGTTCGGAGGGGGGACCAAGCTGGAGATCACA |
| | | GGTGGCGGTGGCTCGGGCGGTGGTGGGTCGGGTGGCGG |
| | | CGGATCTGAGGTGAAACTGCAGGAGTCAGGACCTGGCC |
| | | TGGTGGCGCCCTCACAGAGCCTGTCCGTCACATGCACTG |
| | | TCTCAGGGGTCTCATTACCCGACTATGGTGTAAGCTGGA |
| | | TTCGCCAGCCTCCACGAAAGGGTCTGGAGTGGCTGGGA |
| | | GTAATATGGGGTAGTGAAACCACATACTATAATTCAGC |
| | | TCTCAAATCCAGACTGACCATCATCAAGGACAACTCCA |
| | | AGAGCCAAGTTTTCTTAAAAATGAACAGTCTGCAAACT |
| | | GATGACACAGCCATTTACTACTGTGCCAAACATTATTAC |
| | | TACGGTGGTAGCTATGCTATGGACTACTGGGGCCAAGG |
| | | AACCTCAGTCACCGTCTCCTCAACCACGACGCCAGCGCC |
| | | GCGACCACCAACACCGGCGCCCACCATCGCGTCGCAGC |
| | | CCCTGTCCCTGCGCCCAGAGGCGTGCCGGCCAGCGGCG |
| | | GGGGGCGCAGTGCACACGAGGGGGCTGGACTTCGCCTG |
| | | TGATATCTACATCTGGGCGCCCTTGGCCGGGACTTGTGG |
| | | GGTCCTTCTCCTGTCACTGGTTATCACCCTTTACTGCAA |
| | | ACGGGGCAGAAAGAAACTCCTGTATATATTCAAACAAC |
| | | CATTTATGAGACCAGTACAAACTACTCAAGAGGAAGAT |
| | | GGCTGTAGCTGCCGATTTCCAGAAGAAGAAGAAGGAGG |
| | | ATGTGAACTGAGAGTGAAGTTCAGCAGGAGCGCAGACG |
| | | CCCCCGCGTACAAGCAGGGCCAGAACCAGCTCTATAAC |
| | | GAGCTCAATCTAGGACGAAGAGAGGAGTACGATGTTTT |
| | | GGACAAGAGACGTGGCCGGGACCCTGAGATGGGGGGA |
| | | AAGCCGAGAAGGAAGAACCCTCAGGAAGGCCTGTACA |
| | | ATGAACTGCAGAAAGATAAGATGGCGGAGGCCTACAGT |
| | | GAGATTGGGATGAAAGGCGAGCGCCGGAGGGGCAAGG |
| | | GGCACGATGGCCTTTACCAGGGTCTCAGTACAGCCACC |
| | | AAGGACACCTACGACGCCCTTCACATGCAGGCCCTGCC |
| | | CCCTCGC |
| SEQ ID NO: | CTL019 scFv | DIQMTQTTSSLSASLGDRVTISCRASQDISKYLNWYQQKPD |
| 185 | domain | GTVKLLIYHTSRLHSGVPSRFSGSGSGTDYSLTISNLEQEDI |
| | | ATYFCQQGNTLPYTFGGGTKLEITGGGGSGGGGSGGGGSE |
| | | VKLQESGPGLVAPSQSLSVTCTVSGVSLPDYGVSWIRQPPR |
| | | KGLEWLGVIWGSETTYYNSALKSRLTIIKDNSKSQVFLKM |
| | | NSLQTDDTAIYYCAKHYYYGGSYAMDYWGQGTSVTVSS |

Humanized CAR2

| | | |
|---|---|---|
| SEQ ID NO: | CAR2 scFv | EIVMTQSPATLSLSPGERATLSCRASQDISKYLNWYQQKPG |
| 197 | domain - aa | QAPRLLIYHTSRLHSGIPARFSGSGSGTDYTLTISSLQPEDF |
| | (Linker is | AVYFCQQGNTLPYTFGQGTKLEIKGGGGSGGGGSGGGGS |
| | underlined) | QVQLQESGPGLVKPSETLSLTCTVSGVSLPDYGVSWIRQPP |
| | | GKGLEWIGVIWGSETTYYQSSLKSRVTISKDNSKNQVSLK |
| | | LSSVTAADTAVYYCAKHYYYGGSYAMDYWGQGTLVTVS |
| | | S |
| SEQ ID NO: | CAR2 scFv | ATGGCCCTCCCTGTCACCGCCCTGCTGCTTCCGCTGGCT |
| 198 | domain - nt | CTTCTGCTCCACGCCGCTCGGCCCGAAATTGTGATGACC |
| | | CAGTCACCCGCCACTCTTAGCCTTTCACCCGGTGAGCGC |
| | | GCAACCCTGTCTTGCAGAGCCTCCCAAGACATCTCAAA |
| | | ATACCTTAATTGGTATCAACAGAAGCCCGGACAGGCTC |
| | | CTCGCCTTCTGATCTACCACACCAGCCGGCTCCATTCTG |
| | | GAATCCCTGCCAGGTTCAGCGGTAGCGGATCTGGGACC |
| | | GACTACACCCTCACTATCAGCTCACTGCAGCCAGAGGA |
| | | CTTCGCTGTCTATTTCTGTCAGCAAGGGAACACCCTGCC |
| | | CTACACCTTTGGACAGGGCACCAAGCTCGAGATTAAAG |
| | | GTGGAGGTGGCAGCGGAGGAGGTGGGTCCGGCGGTGG |
| | | AGGAAGCCAGGTCCAACTCCAAGAAAGCGGACCGGGTC |
| | | TTGTGAAGCCATCAGAAACTCTTTCACTGACTTGTACTG |
| | | TGAGCGGAGTGTCTCTCCCCGATTACGGGGTGTCTTGGA |
| | | TCAGACAGCCACCGGGGAAGGGTCTGGAATGGATTGGA |
| | | GTGATTTGGGGCTCTGAGACTACTTACTACCAATCATCC |
| | | CTCAAGTCACGCGTCACCATCTCAAAGGACAACTCTAA |
| | | GAATCAGGTGTCACTGAAACTGTCATCTGTGACCGCAG |
| | | CCGACACCGCCGTGTACTATTGCGCTAAGCATTACTATT |
| | | ATGGCGGGAGCTACGCAATGGATTACTGGGGACAGGGT |
| | | ACTCTGGTCACCGTGTCCAGCCACCACCATCATCACCAT |
| | | CACCAT |
| SEQ ID NO: | CAR 2 - Full - | MALPVTALLLPLALLLHAARPEIVMTQSPATLSLSPGERAT |
| 199 | aa | LSCRASQDISKYLNWYQQKPGQAPRLLIYHTSRLHSGIPAR |
| | | FSGSGSGTDYTLTISSLQPEDFAVYFCQQGNTLPYTFGQGT |
| | | KLEIKGGGGSGGGGSGGGGSQVQLQESGPGLVKPSETLSL |
| | | TCTVSGVSLPDYGVSWIRQPPGKGLEWIGVIWGSETTYYQ |
| | | SSLKSRVTISKDNSKNQVSLKLSSVTAADTAVYYCAKHYY |
| | | YGGSYAMDYWGQGTLVTVSSTTTPAPRPPTPAPTIASQPLS |
| | | LRPEACRPAAGGAVHTRGLDFACDIYIWAPLAGTCGVLLL |
| | | SLVITLYCKRGRKKLLYIFKQPFMRPVQTTQEEDGCSCRFP |
| | | EEEEGGCELRVKFSRSADAPAYKQGQNQLYNELNLGRRE |
| | | EYDVLDKRRGRDPEMGGKPRRKNPQEGLYNELQKDKMA |
| | | EAYSEIGMKGERRRGKGHDGLYQGLSTATKDTYDALHM |
| | | QALPPR |
| SEQ ID NO: | CAR 2 - Full - | ATGGCCCTCCCTGTCACCGCCCTGCTGCTTCCGCTGGCT |
| 200 | nt | CTTCTGCTCCACGCCGCTCGGCCCGAAATTGTGATGACC |
| | | CAGTCACCCGCCACTCTTAGCCTTTCACCCGGTGAGCGC |
| | | GCAACCCTGTCTTGCAGAGCCTCCCAAGACATCTCAAA |
| | | ATACCTTAATTGGTATCAACAGAAGCCCGGACAGGCTC |
| | | CTCGCCTTCTGATCTACCACACCAGCCGGCTCCATTCTG |
| | | GAATCCCTGCCAGGTTCAGCGGTAGCGGATCTGGGACC |
| | | GACTACACCCTCACTATCAGCTCACTGCAGCCAGAGGA |
| | | CTTCGCTGTCTATTTCTGTCAGCAAGGGAACACCCTGCC |
| | | CTACACCTTTGGACAGGGCACCAAGCTCGAGATTAAAG |
| | | GTGGAGGTGGCAGCGGAGGAGGTGGGTCCGGCGGTGG |
| | | AGGAAGCCAGGTCCAACTCCAAGAAAGCGGACCGGGTC |
| | | TTGTGAAGCCATCAGAAACTCTTTCACTGACTTGTACTG |
| | | TGAGCGGAGTGTCTCTCCCCGATTACGGGGTGTCTTGGA |
| | | TCAGACAGCCACCGGGGAAGGGTCTGGAATGGATTGGA |
| | | GTGATTTGGGGCTCTGAGACTACTTACTACCAATCATCC |
| | | CTCAAGTCACGCGTCACCATCTCAAAGGACAACTCTAA |
| | | GAATCAGGTGTCACTGAAACTGTCATCTGTGACCGCAG |
| | | CCGACACCGCCGTGTACTATTGCGCTAAGCATTACTATT |
| | | ATGGCGGGAGCTACGCAATGGATTACTGGGGACAGGGT |
| | | ACTCTGGTCACCGTGTCCAGCACCACTACCCCAGCACCG |
| | | AGGCCACCCACCCCGGCTCCTACCATCGCCTCCCAGCCT |
| | | CTGTCCCTGCGTCCGGAGGCATGTAGACCCGCAGCTGGT |
| | | GGGGCCGTGCATACCCGGGGTCTTGACTTCGCCTGCGAT |
| | | ATCTACATTTGGGCCCCTCTGGCTGGTACTTGCGGGGTC |
| | | CTGCTGCTTTCACTCGTGATCACTCTTTACTGTAAGCGC |
| | | GGTCGGAAGAAGCTGCTGTACATCTTTAAGCAACCCTTC |
| | | ATGAGGCCTGTGCAGACTACTCAAGAGGAGGACGGCTG |
| | | TTCATGCCGGTTCCCAGAGGAGGAGGAAGGCGGCTGCG |
| | | AACTGCGCGTGAAATTCAGCCGCAGCGCAGATGCTCCA |
| | | GCCTACAAGCAGGGGCAGAACCAGCTCTACAACGAACT |
| | | CAATCTTGGTCGGAGAGAGGAGTACGACGTGCTGGACA |
| | | AGCGGAGAGGACGGGACCCAGAAATGGGCGGGAAGCC |
| | | GCGCAGAAAGAATCCCCAAGAGGGCCTGTACAACGAGC |
| | | TCCAAAAGGATAAGATGGCAGAAGCCTATAGCGAGATT |
| | | GGTATGAAAGGGGAACGCAGAAGAGGCAAAGGCCACG |
| | | ACGGACTGTACCAGGGACTCAGCACCGCCACCAAGGAC |
| | | ACCTATGACGCTCTTCACATGCAGGCCCTGCCGCCTCGG |
| SEQ ID NO: | CAR2 - | MALPVTALLLPLALLLHAARPEIVMTQSPATLSLSPGERAT |
| 201 | Soluble scFv - | LSCRASQDISKYLNWYQQKPGQAPRLLIYHTSRLHSGIPAR |
| | aa | FSGSGSGTDYTLTISSLQPEDFAVYFCQQGNTLPYTFGQGT |
| | | KLEIKGGGGSGGGGSGGGGSQVQLQESGPGLVKPSETLSL |
| | | TCTVSGVSLPDYGVSWIRQPPGKGLEWIGVIWGSETTYYQ |
| | | SSLKSRVTISKDNSKNQVSLKLSSVTAADTAVYYCAKHYY |
| | | YGGSYAMDYWGQGTLVTVSSHHHHHHHH |

Murine CART19

| | | |
|---|---|---|
| 221 | HCDR1 | DYGVS |
| | (Kabat) | |
| 222 | HCDR2 | VIWGSETTYYNSALKS |
| | (Kabat) | |
| 223 | HCDR3 | HYYYGGSYAMDY |
| | (Kabat) | |
| 224 | LCDR1 | RASQDISKYLN |
| | (Kabat) | |
| 225 | LCDR2 | HTSRLHS |
| | (Kabat) | |
| 226 | LCDR3 | QQGNTLPYT |
| | (Kabat) | |

Humanized CART19 a

| | | |
|---|---|---|
| 221 | HCDR1 | DYGVS |
| | (Kabat) | |
| 227 | HCDR2 | VIWGSETTYYSSSLKS |
| | (Kabat) | |
| 223 | HCDR3 | HYYYGGSYAMDY |
| | (Kabat) | |
| 224 | LCDR1 | RASQDISKYLN |
| | (Kabat) | |
| 225 | LCDR2 | HTSRLHS |
| | (Kabat) | |
| 226 | LCDR3 | QQGNTLPYT |
| | (Kabat) | |

Humanized CART19 b

| | | |
|---|---|---|
| 221 | HCDR1 | DYGVS |
| | (Kabat) | |
| 228 | HCDR2 | VIWGSETTYYQSSLKS |
| | (Kabat) | |
| 223 | HCDR3 | HYYYGGSYAMDY |
| | (Kabat) | |
| 224 | LCDR1 | RASQDISKYLN |
| | (Kabat) | |
| 225 | LCDR2 | HTSRLHS |
| | (Kabat) | |
| 226 | LCDR3 | QQGNTLPYT |
| | (Kabat) | |

Humanized CART19 c

| | | |
|---|---|---|
| 221 | HCDR1 | DYGVS |
| | (Kabat) | |
| 229 | HCDR2 | VIWGSETTYYNSSLKS |
| | (Kabat) | |
| 223 | HCDR3 | HYYYGGSYAMDY |
| | (Kabat) | |
| 224 | LCDR1 | RASQDISKYLN |
| | (Kabat) | |
| 225 | LCDR2 | HTSRLHS |
| | (Kabat) | |
| 226 | LCDR3 | QQGNTLPYT |
| | (Kabat) | |

TABLE 30
Additional CD19 CAR Constructs

| SEQ ID NO | Description |
|---|---|
| mCAR1 | |
| SEQ ID NO: 186 | mCAR1 scFv |
| SEQ ID NO: 187 | mCAR1 Full amino acid sequence |
| mCAR2 | |
| SEQ ID NO: 188 | mCAR2 scFv |
| SEQ ID NO: 189 | mCAR2 amino acid sequence |
| SEQ ID NO: 190 | mCAR2 full amino acid sequence |
| mCAR3 | |
| SEQ ID NO: 191 | mCAR3 scFv |
| SEQ ID NO: 192 | mCAR3 full amino acid sequence |
| SSJ25-C1 | |
| SEQ ID NO: 193 | SSJ25-C1 VH sequence |
| SEQ ID NO: 194 | SSJ25-C1 VL |
| Humanized CAR1 | |
| SEQ ID NO: 195 | CAR1 scFv domain |
| SEQ ID NO: 196 | CAR 1 - Full - aa |
| Humanized CAR3 | |
| SEQ ID NO: 202 | CAR3 scFv domain |
| SEQ ID NO: 203 | CAR 3 - Full - aa |
| Humanized CAR4 | |
| SEQ ID NO: 204 | CAR4 scFv domain |
| SEQ ID NO: 205 | CAR 4 - Full - aa |
| Humanized CAR5 | |
| SEQ ID NO: 206 | CAR5 scFv domain |
| SEQ ID NO: 207 | CAR 5 - Full - aa |
| Humanized CAR6 | |
| SEQ ID NO: 208 | CAR6 scFv domain |
| SEQ ID NO: 209 | CAR6 - Full - aa |
| Humanized CAR7 | |
| SEQ ID NO: 210 | CAR7 scFv domain |
| SEQ ID NO: 211 | CAR 7 Full - aa |
| Humanized CAR8 | |
| SEQ ID NO: 212 | CAR8 scFv domain |
| SEQ ID NO: 213 | CAR 8 - Full - aa |
| Humanized CAR9 | |
| SEQ ID NO: 214 | CAR9 scFv domain |
| SEQ ID NO: 215 | CAR 9 - Full - aa |
| Humanized CAR 10 | |
| SEQ ID NO: 216 | CAR10 scFv domain |
| SEQ ID NO: 215 | CAR 10 Full - aa |
| Humanized CAR11 | |
| SEQ ID NO: 217 | CAR11 scFv domain |
| SEQ ID NO: 218 | CAR 11 Full - aa |
| Humanized CAR 12 | |
| SEQ ID NO: 219 | CAR12 scFv domain |
| SEQ ID NO: 220 | CAR 12 - Full - aa |

[1054] CD19 CAR constructs containing humanized anti-CD19 scFv domains are described in PCT publication WO 2014/153270, incorporated herein by reference.

[1055] The sequences of murine and humanized CDR sequences of the anti-CD19 scFv domains are shown in Table 6 for the heavy chain variable domains and in Table 7 for the light chain variable domains. In some embodiments, the HCDR1 of a murine or humanized CD19 binding domain is GVSLPDYGVS (SEQ ID NO: 230).

TABLE 6
Heavy Chain Variable Domain CDR (Kabat) SEQ ID NOs of CD19 Antibodies

| Candidate | HCDR1 | HCDR2 | HCDR3 |
|---|---|---|---|
| murine_CART19 | SEQ ID NO: 221 | SEQ ID NO: 222 | SEQ ID NO: 223 |
| humanized_CART19 a | SEQ ID NO: 221 | SEQ ID NO: 227 | SEQ ID NO: 223 |
| humanized_CART19 b | SEQ ID NO: 221 | SEQ ID NO: 228 | SEQ ID NO: 223 |
| humanized_CART19 c | SEQ ID NO: 221 | SEQ ID NO: 229 | SEQ ID NO: 223 |

TABLE 7
Light Chain Variable Domain CDR (Kabat) SEQ ID NOs of CD19 Antibodies

| Candidate | LCDR1 | LCDR2 | LCDR3 |
|---|---|---|---|
| murine_CART 19 | SEQ ID NO: 224 | SEQ ID NO: 225 | SEQ ID NO: 226 |
| humanized_CART19 a | SEQ ID NO: 224 | SEQ ID NO: 225 | SEQ ID NO: 226 |
| humanized_CART19 b | SEQ ID NO: 224 | SEQ ID NO: 225 | SEQ ID NO: 226 |
| humanized_CART19 c | SEQ ID NO: 224 | SEQ ID NO: 225 | SEQ ID NO: 226 |

[1056] Any known CD19 CAR, e.g., the CD19 antigen binding domain of any known CD19 CAR, in the art can be used in accordance with the present disclosure. For example, LG-740; CD19 CAR described in the U.S. Pat. Nos. 8,399,645; 7,446,190; Xu et al., Leuk Lymphoma. 2013 54(2):255-260(2012); Cruz et al., Blood 122(17):2965-2973 (2013); Brentjens et al., Blood, 118(18):4817-4828 (2011); Kochenderfer et al., Blood 116(20):4099-102 (2010); Kochenderfer et al., Blood 122 (25):4129-39(2013); and 16^{th} Annu Meet Am Soc Gen Cell Ther (ASGCT) (May 15-18, Salt Lake City) 2013, Abst 10.

[1057] Exemplary CD19 CARs include CD19 CARs described herein, e.g., in one or more tables described herein, or an anti-CD19 CAR described in Xu et al. Blood 123.24(2014):3750-9; Kochenderfer et al. Blood 122.25(2013):4129-39, Cruz et al. Blood 122.17(2013):2965-73, NCT00586391, NCT01087294, NCT02456350, NCT00840853, NCT02659943, NCT02650999, NCT02640209, NCT01747486, NCT02546739, NCT02656147, NCT02772198, NCT00709033, NCT02081937, NCT00924326, NCT02735083, NCT02794246, NCT02746952, NCT01593696, NCT02134262, NCT01853631, NCT02443831, NCT02277522, NCT02348216, NCT02614066, NCT02030834, NCT02624258, NCT02625480, NCT02030847, NCT02644655, NCT02349698, NCT02813837, NCT02050347, NCT01683279, NCT02529813, NCT02537977, NCT02799550, NCT02672501, NCT02819583, NCT02028455, NCT01840566, NCT01318317, NCT01864889, NCT02706405, NCT01475058, NCT01430390, NCT02146924, NCT02051257, NCT02431988, NCT01815749, NCT02153580, NCT01865617, NCT02208362, NCT02685670, NCT02535364, NCT02631044, NCT02728882, NCT02735291, NCT01860937, NCT02822326, NCT02737085, NCT02465983, NCT02132624, NCT02782351, NCT01493453, NCT02652910, NCT02247609, NCT01029366, NCT01626495, NCT02721407, NCT01044069, NCT00422383, NCT01680991, NCT02794961, or NCT02456207, each of which is incorporated herein by reference in its entirety.

### CD123 CAR

[1058] In other embodiments, the CAR-expressing cells can specifically bind to CD123, e.g., can include a CAR molecule (e.g., any of the CAR1 to CAR8), or an antigen binding domain according to Tables 1-2 of WO 2014/130635, incorporated herein by reference. The amino acid and nucleotide sequences encoding the CD123 CAR molecules and antigen binding domains (e.g., including one, two, three VH CDRs; and one, two, three VL CDRs according to Kabat or Chothia), as specified in WO 2014/130635, are provided in Tables 8-14. Amino and nucleotide sequences identical and substantially identical to the aforesaid sequences provided in Tables 8-14 are specifically incorporated into the instant specification.

[1059] The CDRs for CD123 binding domains provided in Tables 8-14 are according to a combination of the Kabat and Chothia numbering scheme.

TABLE 8
Heavy Chain Variable Domain CDRs

| | | SEQ | | SEQ | | SEQ |
|---|---|---|---|---|---|---|
| Candidate | HCDR1 | ID NO | HCDR2 | ID NO | HCDR3 | ID NO |
| CAR123-2 | GYTFTGYYMH | 231 | WINPNSGGTNYAQKFQG | 234 | DMNILATVPFDI | 236 |
| CAR123-3 | GYIFTGYYIH | 232 | WINPNSGGTNYAQKFQG | 234 | DMNILATVPFDI | 236 |
| CAR123-4 | GYTFTGYYMH | 231 | WINPNSGGTNYAQKFQG | 234 | DMNILATVPFDI | 236 |
| CAR123-1 | GYTFTDYYMH | 233 | WINPNSGDTNYAQKFQG | 235 | DMNILATVPFDI | 236 |

TABLE 9
Light Chain Variable Domain CDRs

| | | SEQ | | SEQ | | SEQ |
|---|---|---|---|---|---|---|
| | | ID | | ID | | ID |
| Candidate | LCDR1 | NO | LCDR2 | NO | LCDR3 | NO |
| CAR123-2 | RASQSISSYLN | 237 | AAFSLQS | 239 | QQGDSVPLT | 241 |
| CAR123-3 | RASQSISSYLN | 237 | AASSLQS | 240 | QQGDSVPLT | 241 |
| CAR123-4 | RASQSISSYLN | 237 | AASSLQS | 240 | QQGDSVPLT | 241 |
| CAR123-1 | RASQSISTYLN | 238 | AASSLQS | 240 | QQGDSVPLT | 241 |

TABLE 10
Heavy Chain Variable Domain CDR

| | | SEQ | | SEQ | | SEQ |
|---|---|---|---|---|---|---|
| | | ID | | ID | | ID |
| | HCDR1 | NO | HCDR2 | NO | HCDR3 | NO |
| hzCAR123 | GYTFTS | 242 | RIDPYDSE | 243 | GNWDDY | 244 |
| | YWMN | | THYNQKFK | | | |
| | | | D | | | |

TABLE 11
Light Chain Variable Domain CDR

| | | SEQ | | SEQ | | SEQ |
|---|---|---|---|---|---|---|
| | | ID | | ID | | ID |
| | LCDR1 | NO | LCDR2 | NO | LCDR3 | NO |
| hzCAR123 | RASKSISKDLA | 245 | SGSTLQS | 246 | QQHNKYPYT | 247 |

TABLE 12
Exemplary CD123 CAR sequences

| Name | SEQ ID NO |
|---|---|
| CAR123-2 NT | SEQ ID NO: 248 |
| CAR123-2 AA | SEQ ID NO: 249 |
| CAR123-2 scFv | SEQ ID NO: 250 |
| CAR123-2 VH | SEQ ID NO: 251 |
| CAR123-2 VL | SEQ ID NO: 252 |
| CAR123-3 NT | SEQ ID NO: 253 |
| CAR123-3 AA | SEQ ID NO: 254 |
| CAR123-3 scFv | SEQ ID NO: 255 |
| CAR123-3 VH | SEQ ID NO: 256 |
| CAR123-3 VL | SEQ ID NO: 257 |
| CAR123-4 NT | SEQ ID NO: 258 |
| CAR123-4 AA | SEQ ID NO: 259 |
| CAR123-4 scFv | SEQ ID NO: 260 |
| CAR123-4 VH | SEQ ID NO: 261 |
| CAR123-4 VL | SEQ ID NO: 262 |
| CAR123-1 NT | SEQ ID NO: 263 |
| CAR123-1 AA | SEQ ID NO: 264 |
| CAR123-1 scFv | SEQ ID NO: 265 |
| CAR123-1 VH | SEQ ID NO: 266 |
| CAR123-1 VL | SEQ ID NO: 267 |

TABLE 13
Humanized CD123 CAR Sequences

| Name | SEQ ID NO |
|---|---|
| hzCAR123-1 NT | 268 |
| hzCAR123-1 AA | 269 |
| hzCAR123-1 scFv | 270 |
| hzCAR123-1 VH | 271 |
| hzCAR123-1 VL | 272 |
| hzCAR123-2 NT | 273 |
| hzCAR123-2 AA | 274 |
| hzCAR123-2 scFv | 275 |
| hzCAR123-2 VH | 271 |
| hzCAR123-2 VL | 276 |
| hzCAR123-3 NT | 277 |
| hzCAR123-3 AA | 278 |
| hzCAR123-3 scFv | 279 |
| hzCAR123-3 VH | 271 |
| hzCAR123-3 VL | 280 |
| hzCAR123-4 NT | 281 |
| hzCAR123-4 AA | 282 |
| hzCAR123-4 scFv | 283 |
| hzCAR123-4 VH | 271 |
| hzCAR123-4 VL | 284 |
| hzCAR123-5 NT | 285 |
| hzCAR123-5 AA | 286 |
| hzCAR123-5 scFv | 287 |
| hzCAR123-5 VH | 271 |
| hzCAR123-5 VL | 272 |
| hzCAR123-6 NT | 288 |
| hzCAR123-6 AA | 289 |
| hzCAR123-6 scFv | 290 |
| hzCAR123-6 VH | 271 |
| hzCAR123-6 VL | 276 |
| hzCAR123-7 NT | 291 |
| hzCAR123-7 AA | 292 |
| hzCAR123-7 scFv | 293 |
| hzCAR123-7 VH | 271 |
| hzCAR123-7 VL | 280 |
| hzCAR123-8 NT | 294 |
| hzCAR123-8 AA | 295 |
| hzCAR123-8 scFv | 296 |
| hzCAR123-8 VH | 271 |
| hzCAR123-8 VL | 284 |
| hzCAR123-9 NT | 297 |
| hzCAR123-9 AA | 298 |
| hzCAR123-9 scFv | 299 |
| hzCAR123-9 VH | 300 |
| hzCAR123-10 VL | 272 |
| hzCAR123-10 NT | 301 |
| hzCAR123-10 AA | 302 |
| hzCAR123-10 scFv | 303 |
| hzCAR123-10 VH | 300 |
| hzCAR123-10 VL | 276 |
| hzCAR123-11 NT | 304 |
| hzCAR123-11 AA | 305 |
| hzCAR123-11 scFv | 306 |
| hzCAR123-11 VH | 300 |
| hzCAR123-11 VL | 280 |
| hzCAR123-12 NT | 307 |
| hzCAR123-12 AA | 308 |
| hzCAR123-12 scFv | 309 |
| hzCAR123-12 VH | 300 |
| hzCAR123-12 VL | 284 |
| hzCAR123-13 NT | 310 |
| hzCAR123-13 AA | 311 |
| hzCAR123-13 scFv | 312 |
| hzCAR123-13 VH | 300 |
| hzCAR123-13 VL | 272 |
| hzCAR123-14 NT | 313 |
| hzCAR123-14 AA | 314 |
| hzCAR123-14 scFv | 315 |
| hzCAR123-14 VH | 300 |
| hzCAR123-14 VL | 276 |
| hzCAR123-15 NT | 316 |
| hzCAR123-15 AA | 317 |
| hzCAR123-15 scFv | 318 |
| hzCAR123-15 VH | 300 |
| hzCAR123-15 VL | 280 |
| hzCAR123-16 NT | 319 |
| hzCAR123-16 AA | 320 |
| hzCAR123-16 scFv | 321 |
| hzCAR123-16 VH | 300 |
| hzCAR123-16 VL | 284 |
| hzCAR123-17 NT | 322 |
| hzCAR123-17 AA | 323 |
| hzCAR123-17 scFv | 324 |
| hzCAR123-17 VH | 325 |
| hzCAR123-17 VL | 272 |
| hzCAR123-18 NT | 326 |
| hzCAR123-18 AA | 327 |
| hzCAR123-18 scFv | 328 |
| hzCAR123-18 VH | 325 |
| hzCAR123-18 VL | 276 |
| hzCAR123-19 NT | 329 |
| hzCAR123-19 AA | 330 |
| hzCAR123-19 scFv | 331 |
| hzCAR123-19 VH | 325 |
| hzCAR123-19 VL | 280 |
| hzCAR123-20 NT | 332 |
| hzCAR123-20 AA | 333 |
| hzCAR123-20 scFv | 334 |
| hzCAR123-20 VH | 325 |
| hzCAR123-20 VL | 284 |
| hzCAR123-21 NT | 335 |
| hzCAR123-21 AA | 336 |
| hzCAR123-21 scFv | 337 |
| hzCAR123-21 VH | 325 |
| hzCAR123-21 VL | 272 |
| hzCAR123-22 NT | 338 |
| hzCAR123-22 AA | 339 |
| hzCAR123-22 scFv | 340 |
| hzCAR123-22 VH | 325 |
| hzCAR123-22 VL | 276 |
| hzCAR123-23 NT | 341 |
| hzCAR123-23 AA | 342 |
| hzCAR123-23 scFv | 343 |
| hzCAR123-23 VH | 325 |
| hzCAR123-23 VL | 280 |
| hzCAR123-24 NT | 344 |
| hzCAR123-24 AA | 345 |
| hzCAR123-24 scFv | 346 |
| hzCAR123-24 VH | 325 |
| hzCAR123-24 VL | 284 |
| hzCAR123-25 NT | 347 |
| hzCAR123-25 AA | 348 |
| hzCAR123-25 scFv | 349 |
| hzCAR123-25 VH | 350 |
| hzCAR123-25 VL | 272 |
| hzCAR123-26 NT | 351 |
| hzCAR123-26 AA | 352 |
| hzCAR123-26 scFv | 353 |
| hzCAR123-26 VH | 350 |
| hzCAR123-26 VL | 276 |
| hzCAR123-27 NT | 354 |
| hzCAR123-27 AA | 355 |
| hzCAR123-27 scFv | 356 |
| hzCAR123-27 VH | 350 |
| hzCAR123-27 VL | 280 |
| hzCAR123-28 NT | 357 |
| hzCAR123-28 AA | 358 |
| hzCAR123-28 scFv | 359 |
| hzCAR123-28 VH | 350 |
| hzCAR123-28 VL | 284 |
| hzCAR123-29 NT | 360 |
| hzCAR123-29 AA | 361 |
| hzCAR123-29 scFv | 362 |
| hzCAR123-29 VH | 350 |
| hzCAR123-29 VL | 272 |
| hzCAR123-30 NT | 363 |
| hzCAR123-30 AA | 364 |
| hzCAR123-30 scFv | 365 |
| hzCAR123-30 VH | 350 |
| hzCAR123-30 VL | 276 |
| hzCAR123-31 NT | 366 |
| hzCAR123-31 AA | 367 |
| hzCAR123-31 scFv | 368 |
| hzCAR123-31 VH | 350 |
| hzCAR123-31 VL | 280 |
| hzCAR123-32 NT | 369 |
| hzCAR123-32 AA | 370 |
| hzCAR123-32 scFv | 371 |
| hzCAR123-32 VH | 350 |
| hzCAR123-32 VL | 284 |

[1060] In embodiments, a CAR molecule described herein comprises a scFv that specifically binds to CD123, and does not contain a leader sequence, e.g., the amino acid sequence SEQ ID NO: 64. Table 14 below provides amino acid and nucleotide sequences for CD123 scFv sequences that do not contain a leader sequence SEQ ID NO: 64.

TABLE 14
CD123 CAR scFv sequences

| Name | SEQ ID NO |
|---|---|
| CAR123-2 scFv - NT | 372 |
| CAR123-2 scFv - AA | 373 |
| CAR123-2 ORF-free NT | 374 |
| CAR123-3 scFv - NT | 375 |
| CAR123-3 scFv - AA | 376 |
| CAR123-4 scFv - NT | 377 |
| CAR123-4 scFv - AA | 378 |
| CAR123-1 scFv-AA | 379 |
| hzCAR123-1 scFv | 380 |
| hzCAR123-2 scFv | 381 |
| hzCAR123-3 scFv | 382 |
| hzCAR123-4 scFv | 383 |
| hzCAR123-5 scFv | 384 |
| hzCAR123-6 scFv | 385 |
| hzCAR123-7 scFv | 386 |
| hzCAR123-8 scFv | 387 |
| hzCAR123-9 scFv | 388 |
| hzCAR123-10 scFv | 389 |
| hzCAR123-11 scFv | 390 |
| hzCAR123-12 scFv | 391 |
| hzCAR123-13 scFv | 392 |
| hzCAR123-14 scFv | 393 |
| hzCAR123-15 scFv | 394 |
| hzCAR123-16 scFv | 395 |
| hzCAR123-17 scFv | 396 |
| hzCAR123-18 scFv | 397 |
| hzCAR123-19 scFv | 398 |
| hzCAR123-20 scFv | 399 |
| hzCAR123-21 scFv | 400 |
| hzCAR123-22 scFv | 401 |
| hzCAR123-23 scFv | 402 |
| hzCAR123-24 scFv | 403 |
| hzCAR123-25 scFv | 404 |
| hzCAR123-26 scFv | 405 |
| hzCAR123-27 scFv | 406 |
| hzCAR123-28 scFv | 407 |
| hzCAR123-29 scFv | 408 |
| hzCAR123-30 scFv | 409 |
| hzCAR123-31 scFv | 410 |
| hzCAR123-32 scFv | 411 |

[1061] In other embodiments, the CAR-expressing cells can specifically bind to CD123, e.g., can include a CAR molecule (e.g., any of the CAR123-1 or CAR123-4 and hzCAR123-1 to hzCAR123-32), or an antigen binding domain according to Tables 2, 6, and 9 of WO2016/028896, incorporated herein by reference. The amino acid and nucleotide sequences encoding the CD123 CAR molecules and antigen binding domains (e.g., including one, two, three VH CDRs; and one, two, three VL CDRs according to Kabat or Chothia), as specified in WO2016/028896, are incorporated herein by reference in their entireties.

### EGFRvIII CAR

[1062] In other embodiments, the CAR-expressing cells can specifically bind to EGFRvIII, e.g., can include a CAR molecule, or an antigen binding domain according to Table 2 or SEQ ID NO:11 of WO 2014/130657, incorporated herein by reference. Exemplary amino acid and nucleotide sequences encoding the EGFRvIII CAR molecules and antigen binding domains (e.g., including one, two, three VH CDRs; and one, two, three VL CDRs according to Kabat or Chothia) are provided in WO 2014/130657. Exemplary anti-EGFRvIII CAR sequences may comprise a CDR, a variable region, an scFv, or a full-length CAR sequence of a sequence disclosed in Table 33 (or a sequence at least about 85%, 90%, 95%, 99% or more identical thereto, and/or having one, two, three or more substitutions, insertions, deletions, or modifications).

TABLE 33
EGFRvIII CAR sequences.

| Name | SEQ ID NO: |
|---|---|
| CAR 1 | |
| CAR1 scFv domain | SEQ ID NO: 1451 |
| CAR1 scFv domain nt | SEQ ID NO: 1452 |
| CAR1 Soluble scFv - nt | SEQ ID NO: 1453 |
| CAR1 Soluble scFv - aa | SEQ ID NO: 1454 |
| CAR 1 - Full - nt lentivirus | SEQ ID NO: 1455 |
| CAR 1 - Full - aa | SEQ ID NO: 1456 |
| CAR 2 | |
| CAR2 scFv domain | SEQ ID NO: 1457 |
| CAR2 scFv domain - nt | SEQ ID NO: 1458 |
| CAR2 - Soluble scFv - nt | SEQ ID NO: 1459 |
| CAR2 - Soluble scFv - aa | SEQ ID NO: 1460 |
| CAR 2 - Full-nt | SEQ ID NO: 1461 |
| CAR 2 - Full - aa | SEQ ID NO: 1462 |
| CAR 3 | |
| CAR3 scFv domain | SEQ ID NO: 1463 |
| CAR3 scFv domain nt | SEQ ID NO: 1464 |
| CAR 3 - Soluble scFv - nt | SEQ ID NO: 1465 |
| CAR 3 - Soluble scFv - aa | SEQ ID NO: 1466 |
| CAR 3 - Full - nt | SEQ ID NO: 1467 |
| CAR 3 - Full - aa | SEQ ID NO: 1468 |
| CAR 4 | |
| CAR4 scFv domain | SEQ ID NO: 1469 |
| CAR4 scFv domain nt | SEQ ID NO: 1470 |
| CAR4 - Soluble scFv - nt | SEQ ID NO: 1471 |
| CAR4 - Soluble scFv - aa | SEQ ID NO: 1472 |
| CAR 4 - Full - nt | SEQ ID NO: 1473 |
| CAR 4 - Full - aa | SEQ ID NO: 1474 |
| CAR 5 | |
| CAR5 scFv domain | SEQ ID NO: 1475 |
| CAR5 scFv domain nt | SEQ ID NO: 1476 |
| CAR5 - Soluble scFv - nt | SEQ ID NO: 1477 |
| CAR5 - Soluble scFv - aa | SEQ ID NO: 1478 |
| CAR 5 - Full - nt | SEQ ID NO: 1479 |
| CAR 5 - Full - aa | SEQ ID NO: 1480 |
| CAR 6 | |
| CAR6 scFv domain | SEQ ID NO: 1481 |
| CAR6 scFv domain nt | SEQ ID NO: 1482 |
| CAR6 - Soluble scFv - nt | SEQ ID NO: 1483 |
| CAR6 - Soluble scFv - aa | SEQ ID NO: 1484 |
| CAR6 -Full - nt | SEQ ID NO: 1485 |
| CAR6 -Full - aa | SEQ ID NO: 1486 |
| CAR 7 | |
| CAR7 scFv domain | SEQ ID NO: 1487 |
| CAR7 scFv domain nt | SEQ ID NO: 1488 |
| CAR7 - Soluble scFv - nt | SEQ ID NO: 1489 |
| CAR7 - Soluble scFv - aa | SEQ ID NO: 1490 |
| CAR 7 Full - nt | SEQ ID NO: 1491 |
| CAR 7 Full - aa | SEQ ID NO: 1492 |
| CAR 8 | |
| CAR8 scFv domain | SEQ ID NO: 1493 |
| CAR8 scFv domain nt | SEQ ID NO: 1494 |
| CAR8 - Soluble scFv - nt | SEQ ID NO: 1495 |
| CAR8 - Soluble scFv - aa | SEQ ID NO: 1496 |
| CAR 8 - Full - nt | SEQ ID NO: 1497 |
| CAR 8 - Full - aa | SEQ ID NO: 1498 |
| CAR 9 | Mouse anti-EGFRvIII clone 3C10 |
| CAR9 scFv domain | SEQ ID NO: 1499 |
| CAR9 scFv domain nt | SEQ ID NO: 1500 |
| CAR9 - Soluble scFv - nt | SEQ ID NO: 1501 |
| CAR9 - Soluble scFv - aa | SEQ ID NO: 1502 |
| CAR 9 - Full - nt | SEQ ID NO: 1503 |
| CAR 9 - Full - aa | SEQ ID NO: 1504 |
| CAR10 | Anti-EGFRvIII clone 139 |
| CAR10 scFv domain | SEQ ID NO: 1505 |
| CAR9 scFv domain nt | SEQ ID NO: 1506 |
| CAR10 - Soluble scFv - nt | SEQ ID NO: 1507 |
| CAR10 - Soluble scFv - aa | SEQ ID NO: 1508 |
| CAR 10 Full - nt | SEQ ID NO: 1509 |
| CAR 10 Full - aa | SEQ ID NO: 1510 |

### CD33 CAR

[1063] In other embodiments, the CAR-expressing cells can specifically bind to CD33, e.g., can include a CAR molecule (e.g., any of CAR33-1 to CAR-33-9), or an antigen binding domain according to Table 2 or 9 of WO2016/014576, incorporated herein by reference. Exemplary amino acid and nucleotide sequences encoding the CD33 CAR molecules and antigen binding domains (e.g., including one, two, three VH CDRs; and one, two, three VL CDRs according to Kabat or Chothia) are provided in WO2016/014576.

### Mesothelin CAR

[1064] In some embodiments, the CAR-expressing cells can specifically bind to mesothelin, e.g., can include a CAR molecule, or an antigen binding domain according to Tables 2-3 of WO 2015/090230, incorporated herein by reference. Exemplary amino acid and nucleotide sequences encoding the mesothelin CAR molecules and antigen binding domains (e.g., including one, two, three VH CDRs; and one, two, three VL CDRs according to Kabat or Chothia) are provided in WO 2015/090230. Exemplary anti-mesothelin CAR sequences may comprise a CDR, a variable region, an scFv, or a full-length CAR sequence of a sequence disclosed in Table 34 (or a sequence at least about 85%, 90%, 95%, 99% or more identical thereto, and/or having one, two, three or more substitutions, insertions, deletions, or modifications).

TABLE 34
Mesothelin CAR sequences. Amino acid sequences of human scFvs and
CARs that bind to mesothelin (bold underline is the leader sequence).
In the case of the scFvs, the remaining amino acids are the heavy
chain variable region and light chain variable regions, with each
of the HC CDRs (HC CDR1, HC CDR2, HC CDR3) and LC CDRs (LC CDR1,
LC CDR2, LCCDR3) underlined. In the case of the CARs, the further
remaining amino acids are the remaining amino acids of the CARs.

| SEQ ID | | |
|---|---|---|
| NO: | Description | Amino Acid Sequence |
| SEQ ID | M1 (ScFv | QVQLQQSGAEVKKPGASVKVSCKASGYTFTGYYMHWVRQAPGQGLEWMGRINPNSGGTNY |
| NO: | domain) | AQKFQGRVTMTRDTSISTAYMELSRLRSEDTAVYYCARGRYYGMDVWGQGTMVTVSSGGG |
| 1511 | | GSGGGGSGGGGSGGGGSEIVLTQSPATLSLSPGERATISCRASQSVSSNFAWYQQRPGQA |
| | | PRLLIYDASNRATGIPPRFSGSGSGTDFTLTISSLEPEDFAAYYCHQRSNWLYTFGQGTK |
| | | VDIK |
| SEQ ID | M1 (full) | MALPVTALLLPLALLLHAARPQVQLQQSGAEVKKPGASVKVSCKASGYTFTGYYMHWVRQ |
| NO: | >ZA53- | APGQGLEWMGRINPNSGGTNYAQKFQGRVTMTRDTSISTAYMELSRLRSEDTAVYYCARG |
| 1512 | 27BC | RYYGMDVWGQGTMVTVSSGGGGSGGGGSGGGGSGGGGSEIVLTQSPATLSLSPGERATIS |
| | (M1 | CRASQSVSSNFAWYQQRPGQAPRLLIYDASNRATGIPPRFSGSGSGTDFTLTISSLEPED |
| | ZA53- | FAAYYCHQRSNWLYTFGQGTKVDIKTTTPAPRPPTPAPTIASQPLSLRPEACRPAAGGAV |
| | 27BC | HTRGLDFACDIYIWAPLAGTCGVLLLSLVITLYCKRGRKKLLYIFKQPFMRPVQTTQEED |
| | R001- | GCSCRFPEEEEGGCELRVKFSRSADAPAYKQGQNQLYNELNLGRREEYDVLDKRRGRDPE |
| | A11126161) | MGGKPRRKNPQEGLYNELQKDKMAEAYSEIGMKGERRRGKGHDGLYQGLSTATKDTYDAL |
| | | HMQALPPR |
| SEQ ID | M2 (ScFv | QVQLVQSGAEVKKPGASVKVSCKASGYTFTGYYMHWVRQAPGQGLEWMGWINPNSGGTNY |
| NO: | domain) | AQKFQGRVTMTRDTSISTAYMELSRLRSDDTAVYYCARDLRRTVVTPRAYYGMDVWGQGT |
| 1513 | | TVTVSSGGGGSGGGGSGGGGSGGGGSDIQLTQSPSTLSASVGDRVTITCQASQDISNSLN |
| | | WYQQKAGKAPKLLIYDASTLETGVPSRFSGSGSGTDFSFTISSLQPEDIATYYCQQHDNL |
| | | PLTFGQGTKVEIK |
| SEQ ID | M2 (full) | MALPVTALLLPLALLLHAARPQVQLVQSGAEVKKPGASVKVSCKASGYTFTGYYMHWVRQ |
| NO: | >FA56- | APGQGLEWMGWINPNSGGTNYAQKFQGRVTMTRDTSISTAYMELSRLRSDDTAVYYCARD |
| 1514 | 26RC | LRRTVVTPRAYYGMDVWGQGTTVTVSSGGGGSGGGGSGGGGSGGGGSDIQLTQSPSTLSA |
| | (M2 | SVGDRVTITCQASQDISNSLNWYQQKAGKAPKLLIYDASTLETGVPSRFSGSGSGTDFSF |
| | FA56- | TISSLQPEDIATYYCQQHDNLPLTFGQGTKVEIKTTTPAPRPPTPAPTIASQPLSLRPEA |
| | 26RC | CRPAAGGAVHTRGLDFACDIYIWAPLAGTCGVLLLSLVITLYCKRGRKKLLYIFKQPFMR |
| | R001- | PVQTTQEEDGCSCRFPEEEEGGCELRVKFSRSADAPAYKQGQNQLYNELNLGRREEYDVL |
| | A10126162) | DKRRGRDPEMGGKPRRKNPQEGLYNELQKDKMAEAYSEIGMKGERRRGKGHDGLYQGLST |
| | | ATKDTYDALHMQALPPR |
| SEQ ID | M3 (ScFv | QVQLVQSGAEVKKPGAPVKVSCKASGYTFTGYYMHWVRQAPGQGLEWMGWINPNSGGTNY |
| NO: | domain) | AQKFQGRVTMTRDTSISTAYMELSRLRSDDTAVYYCARGEWDGSYYYDYWGQGTLVTVSS |
| 1515 | | GGGGSGGGGSGGGGSGGGGSDIVLTQTPSSLSASVGDRVTITCRASQSINTYLNWYQHKP |
| | | GKAPKLLIYAASSLQSGVPSRFSGSGSGTDFTLTISSLQPEDFATYYCQQSFSPLTFGGG |
| | | TKLEIK |
| SEQ ID | M3 | MALPVTALLLPLALLLHAARPQVQLVQSGAEVKKPGAPVKVSCKASGYTFTGYYMHWVRQ |
| NO: | >VA58- | APGQGLEWMGWINPNSGGTNYAQKFQGRVTMTRDTSISTAYMELSRLRSDDTAVYYCARG |
| 1516 | 21LC | EWDGSYYYDYWGQGTLVTVSSGGGGSGGGGSGGGGSGGGGSDIVLTQTPSSLSASVGDRV |
| | (M3 | TITCRASQSINTYLNWYQHKPGKAPKLLIYAASSLQSGVPSRFSGSGSGTDFTLTISSLQ |
| | VA58- | PEDFATYYCQQSFSPLTFGGGTKLEIKTTTPAPRPPTPAPTIASQPLSLRPEACRPAAGG |
| | 21LC | AVHTRGLDFACDIYIWAPLAGTCGVLLLSLVITLYCKRGRKKLLYIFKQPFMRPVQTTQE |
| | R001- | EDGCSCRFPEEEEGGCELRVKFSRSADAPAYKQGQNQLYNELNLGRREEYDVLDKRRGRD |
| | A1126163) | PEMGGKPRRKNPQEGLYNELQKDKMAEAYSEIGMKGERRRGKGHDGLYQGLSTATKDTYD |
| | | ALHMQALPPR |
| SEQ ID | M4 (ScFv | QVQLVESGGGLVQPGGSLRLSCAASGFTFSSYWMHWVRQVPGKGLVWVSRINTDGSTTTY |
| NO: | domain) | ADSVEGRFTISRDNAKNTLYLQMNSLRDDDTAVYYCVGGHWAVWGQGTTVTVSSGGGGSG |
| 1517 | | GGGSGGGGSGGGGSDIQMTQSPSTLSASVGDRVTITCRASQSISDRLAWYQQKPGKAPKL |
| | | LIYKASSLESGVPSRFSGSGSGTEFTLTISSLQPDDFAVYYCQQYGHLPMYTFGQGTKVE |
| | | IK |
| SEQ ID | M4 | MALPVTALLLPLALLLHAARPQVQLVESGGGLVQPGGSLRLSCAASGFTFSSYWMHWVRQ |
| NO: | >DP37- | VPGKGLVWVSRINTDGSTTTYADSVEGRFTISRDNAKNTLYLQMNSLRDDDTAVYYCVGG |
| 1518 | 071C | HWAVWGQGTTVTVSSGGGGSGGGGSGGGGSGGGGSDIQMTQSPSTLSASVGDRVTITCRA |
| | (M4 | SQSISDRLAWYQQKPGKAPKLLIYKASSLESGVPSRFSGSGSGTEFTLTISSLQPDDFAV |
| | DP37- | YYCQQYGHLPMYTFGQGTKVEIKTTTPAPRPPTPAPTIASQPLSLRPEACRPAAGGAVHT |
| | 071C | RGLDFACDIYIWAPLAGTCGVLLLSLVITLYCKRGRKKLLYIFKQPFMRPVQTTQEEDGC |
| | R001- | SCRFPEEEEGGCELRVKFSRSADAPAYKQGQNQLYNELNLGRREEYDVLDKRRGRDPEMG |
| | C6126164) | GKPRRKNPQEGLYNELQKDKMAEAYSEIGMKGERRRGKGHDGLYQGLSTATKDTYDALHM |
| | | QALPPR |
| SEQ ID | M5 (ScFv | QVQLVQSGAEVEKPGASVKVSCKASGYTFTDYYMHWVRQAPGQGLEWMGWINPNSGGTNY |
| NO: | domain) | AQKFQGRVTMTRDTSISTAYMELSRLRSDDTAVYYCASGWDFDYWGQGTLVTVSSGGGGS |
| 1519 | | GGGGSGGGGSGGGGSDIVMTQSPSSLSASVGDRVTITCRASQSIRYYLSWYQQKPGKAPK |
| | | LLIYTASILQNGVPSRFSGSGSGTDFTLTISSLQPEDFATYYCLQTYTTPDFGPGTKVEI |
| | | K |
| SEQ ID | M5 | MALPVTALLLPLALLLHAARPQVQLVQSGAEVEKPGASVKVSCKASGYTFTDYYMHWVRQ |
| NO: | >XP31- | APGQGLEWMGWINPNSGGTNYAQKFQGRVTMTRDTSISTAYMELSRLRSDDTAVYYCASG |
| 1520 | 20LC | WDFDYWGQGTLVTVSSGGGGSGGGGSGGGGSGGGGSDIVMTQSPSSLSASVGDRVTITCR |
| | (M5 | ASQSIRYYLSWYQQKPGKAPKLLIYTASILQNGVPSRFSGSGSGTDFTLTISSLQPEDFA |
| | XP31- | TYYCLQTYTTPDFGPGTKVEIKTTTPAPRPPTPAPTIASQPLSLRPEACRPAAGGAVHTR |
| | 20LC | GLDFACDIYIWAPLAGTCGVLLLSLVITLYCKRGRKKLLYIFKQPFMRPVQTTQEEDGCS |
| | R001- | CRFPEEEEGGCELRVKFSRSADAPAYKQGQNQLYNELNLGRREEYDVLDKRRGRDPEMGG |
| | B4126165) | KPRRKNPQEGLYNELQKDKMAEAYSEIGMKGERRRGKGHDGLYQGLSTATKDTYDALHMQ |
| | | ALPPR |
| SEQ ID | M6 (ScFv | QVQLVQSGAEVKKPGASVKVSCKASGYTFTSYYMHWVRQAPGQGLEWMGIINPSGGSTSY |
| NO: | domain) | AQKFQGRVTMTRDTSTSTVYMELSSLRSEDTAVYYCARYRLIAVAGDYYYYGMDVWGQGT |
| 1521 | | MVTVSSGGGGSGGGGSGGGGSGGGGSDIQMTQSPSSVSASVGDRVTITCRASQGVGRWLA |
| | | WYQQKPGTAPKLLIYAASTLQSGVPSRFSGSGSGTDFTLTINNLQPEDFATYYCQQANSF |
| | | PLTFGGGTRLEIK |
| SEQ ID | M6 | MALPVTALLLPLALLLHAARPQVQLVQSGAEVKKPGASVKVSCKASGYTFTSYYMHWVRQ |
| NO: | >FE10- | APGQGLEWMGIINPSGGSTSYAQKFQGRVTMTRDTSTSTVYMELSSLRSEDTAVYYCARY |
| 1522 | 06ID | RLIAVAGDYYYYGMDVWGQGTMVTVSSGGGGSGGGGSGGGGSGGGGSDIQMTQSPSSVSA |
| | (M6 | SVGDRVTITCRASQGVGRWLAWYQQKPGTAPKLLIYAASTLQSGVPSRFSGSGSGTDFTL |
| | 46FE10- | TINNLQPEDFATYYCQQANSFPLTFGGGTRLEIKTTTPAPRPPTPAPTIASQPLSLRPEA |
| | 06ID | CRPAAGGAVHTRGLDFACDIYIWAPLAGTCGVLLLSLVITLYCKRGRKKLLYIFKQPFMR |
| | R001- | PVQTTQEEDGCSCRFPEEEEGGCELRVKFSRSADAPAYKQGQNQLYNELNLGRREEYDVL |
| | A4126166) | DKRRGRDPEMGGKPRRKNPQEGLYNELQKDKMAEAYSEIGMKGERRRGKGHDGLYQGLST |
| | | ATKDTYDALHMQALPPR |
| SEQ ID | M7 (ScFv | QVQLVQSGGGVVQPGRSLRLSCAASGFTFSSYAMHWVRQAPGKGLEWVAVISYDGSNKYY |
| NO: | domain) | ADSVKGRFTISRDNSKNTLYLQMNSLRAEDTAVYYCARWKVSSSSPAFDYWGQGTLVTVS |
| 1523 | | SGGGGSGGGGSGGGGSGGGGSEIVLTQSPATLSLSPGERAILSCRASQSVYTKYLGWYQQ |
| | | KPGQAPRLLIYDASTRATGIPDRFSGSGSGTDFTLTINRLEPEDFAVYYCQHYGGSPLIT |
| | | FGQGTRLEIK |
| SEQ ID | M7 | MALPVTALLLPLALLLHAARPQVQLVQSGGGVVQPGRSLRLSCAASGFTFSSYAMHWVRQ |
| NO: | >VE12- | APGKGLEWVAVISYDGSNKYYADSVKGRFTISRDNSKNTLYLQMNSLRAEDTAVYYCARW |
| 1524 | 01CD | KVSSSSPAFDYWGQGTLVTVSSGGGGSGGGGSGGGGSGGGGSEIVLTQSPATLSLSPGER |
| | (M7 | AILSCRASQSVYTKYLGWYQQKPGQAPRLLIYDASTRATGIPDRFSGSGSGTDFTLTINR |
| | VE12- | LEPEDFAVYYCQHYGGSPLITFGQGTRLEIKTTTPAPRPPTPAPTIASQPLSLRPEACRP |
| | 01CD | AAGGAVHTRGLDFACDIYIWAPLAGTCGVLLLSLVITLYCKRGRKKLLYIFKQPFMRPVQ |
| | R001- | TTQEEDGCSCRFPEEEEGGCELRVKFSRSADAPAYKQGQNQLYNELNLGRREEYDVLDKR |
| | A5126167) | RGRDPEMGGKPRRKNPQEGLYNELQKDKMAEAYSEIGMKGERRRGKGHDGLYQGLSTATK |
| | | DTYDALHMQALPPR |
| SEQ ID | M8 (ScFv | QVQLQQSGAEVKKPGASVKVSCKTSGYPFTGYSLHWVRQAPGQGLEWMGWINPNSGGTNY |
| NO: | domain) | AQKFQGRVTMTRDTSISTAYMELSRLRSDDTAVYYCARDHYGGNSLFYWGQGTLVTVSSG |
| 1525 | | GGGSGGGGSGGGGSGGGGSDIQLTQSPSSISASVGDTVSITCRASQDSGTWLAWYQQKPG |
| | | KAPNLLMYDASTLEDGVPSRFSGSASGTEFTLTVNRLQPEDSATYYCQQYNSYPLTFGGG |
| | | TKVDIK |
| SEQ ID | M8 | MALPVTALLLPLALLLHAARPQVQLQQSGAEVKKPGASVKVSCKTSGYPFTGYSLHWVRQ |
| NO: | >LE13- | APGQGLEWMGWINPNSGGTNYAQKFQGRVTMTRDTSISTAYMELSRLRSDDTAVYYCARD |
| 1526 | 05XD | HYGGNSLFYWGQGTLVTVSSGGGGSGGGGSGGGGSGGGGSDIQLTQSPSSISASVGDTVS |
| | (M8 | ITCRASQDSGTWLAWYQQKPGKAPNLLMYDASTLEDGVPSRFSGSASGTEFTLTVNRLQP |
| | LE13- | EDSATYYCQQYNSYPLTFGGGTKVDIKTTTPAPRPPTPAPTIASQPLSLRPEACRPAAGG |
| | 05XD | AVHTRGLDFACDIYIWAPLAGTCGVLLLSLVITLYCKRGRKKLLYIFKQPFMRPVQTTQE |
| | R001- | EDGCSCRFPEEEEGGCELRVKFSRSADAPAYKQGQNQLYNELNLGRREEYDVLDKRRGRD |
| | E5126168) | PEMGGKPRRKNPQEGLYNELQKDKMAEAYSEIGMKGERRRGKGHDGLYQGLSTATKDTYD |
| | | ALHMQALPPR |
| SEQ ID | M9 (ScFv | QVQLVQSGAEVKKPGASVEVSCKASGYTFTSYYMHWVRQAPGQGLEWMGIINPSGGSTGY |
| NO: | domain) | AQKFQGRVTMTRDTSTSTVHMELSSLRSEDTAVYYCARGGYSSSSDAFDIWGQGTMVTVS |
| 1527 | | SGGGGSGGGGSGGGGSGGGGSDIQMTQSPPSLSASVGDRVTITCRASQDISSALAWYQQK |
| | | PGTPPKLLIYDASSLESGVPSRFSGSGSGTDFTLTISSLQPEDFATYYCQQFSSYPLTFG |
| | | GGTRLEIK |
| SEQ ID | M9 | MALPVTALLLPLALLLHAARPQVQLVQSGAEVKKPGASVEVSCKASGYTFTSYYMHWVRQ |
| NO: | >BE15- | APGQGLEWMGIINPSGGSTGYAQKFQGRVTMTRDTSTSTVHMELSSLRSEDTAVYYCARG |
| 1528 | 00SD | GYSSSSDAFDIWGQGTMVTVSSGGGGSGGGGSGGGGSGGGGSDIQMTQSPPSLSASVGDR |
| | (M9 | VTITCRASQDISSALAWYQQKPGTPPKLLIYDASSLESGVPSRFSGSGSGTDFTLTISSL |
| | BE15- | QPEDFATYYCQQFSSYPLTFGGGTRLEIKTTTPAPRPPTPAPTIASQPLSLRPEACRPAA |
| | 00SD | GGAVHTRGLDFACDIYIWAPLAGTCGVLLLSLVITLYCKRGRKKLLYIFKQPFMRPVQTT |
| | R001- | QEEDGCSCRFPEEEEGGCELRVKFSRSADAPAYKQGQNQLYNELNLGRREEYDVLDKRRG |
| | A3126169) | RDPEMGGKPRRKNPQEGLYNELQKDKMAEAYSEIGMKGERRRGKGHDGLYQGLSTATKDT |
| | | YDALHMQALPPR |
| SEQ ID | M10 | QVQLVQSGAEVKKPGASVKVSCKASGYTFTSYGISWVRQAPGQGLEWMGWISAYNGNTNY |
| NO: | (ScFv | AQKLQGRVTMTTDTSTSTAYMELRSLRSDDTAVYYCARVAGGIYYYYGMDVWGQGTTITV |
| 1529 | domain) | SSGGGGSGGGGSGGGGSGGGGSDIVMTQTPDSLAVSLGERATISCKSSHSVLYNRNNKNY |
| | | LAWYQQKPGQPPKLLFYWASTRKSGVPDRFSGSGSGTDFTLTISSLQPEDFATYFCQQTQ |
| | | TFPLTFGQGTRLEIN |
| SEQ ID | M10 | MALPVTALLLPLALLLHAARPQVQLVQSGAEVKKPGASVKVSCKASGYTFTSYGISWVRQ |
| NO: | >RE16- | APGQGLEWMGWISAYNGNTNYAQKLQGRVTMTTDTSTSTAYMELRSLRSDDTAVYYCARV |
| 1530 | 05MD | AGGIYYYYGMDVWGQGTTITVSSGGGGSGGGGSGGGGSGGGGSDIVMTQTPDSLAVSLGE |
| | (M10 | RATISCKSSHSVLYNRNNKNYLAWYQQKPGQPPKLLFYWASTRKSGVPDRFSGSGSGTDF |
| | RE16- | TLTISSLQPEDFATYFCQQTQTFPLTFGQGTRLEINTTTPAPRPPTPAPTIASQPLSLRP |
| | 05MD | EACRPAAGGAVHTRGLDFACDIYIWAPLAGTCGVLLLSLVITLYCKRGRKKLLYIFKQPF |
| | R001- | MRPVQTTQEEDGCSCRFPEEEEGGCELRVKFSRSADAPAYKQGQNQLYNELNLGRREEYD |
| | D10126170) | VLDKRRGRDPEMGGKPRRKNPQEGLYNELQKDKMAEAYSEIGMKGERRRGKGHDGLYQGL |
| | | STATKDTYDALHMQALPPR |
| SEQ ID | M11 | QVQLQQSGAEVKKPGASVKVSCKASGYTFTGYYMHWVRQAPGQGLEWMGWINPNSGGTNY |
| NO: | (ScFv | AQNFQGRVTMTRDTSISTAYMELRRLRSDDTAVYYCASGWDFDYWGQGTLVTVSSGGGGS |
| 1531 | domain) | GGGGSGGGGSGGGGSDIRMTQSPSSLSASVGDRVTITCRASQSIRYYLSWYQQKPGKAPK |
| | | LLIYTASILQNGVPSRFSGSGSGTDFTLTISSLQPEDFATYYCLQTYTTPDFGPGTKVEI |
| | | K |
| SEQ ID | M11 | MALPVTALLLPLALLLHAARPQVQLQQSGAEVKKPGASVKVSCKASGYTFTGYYMHWVRQ |
| NO: | >NE10- | APGQGLEWMGWINPNSGGTNYAQNFQGRVTMTRDTSISTAYMELRRLRSDDTAVYYCASG |
| 1532 | 19WD | WDFDYWGQGTLVTVSSGGGGSGGGGSGGGGSGGGGSDIRMTQSPSSLSASVGDRVTITCR |
| | (M11 | ASQSIRYYLSWYQQKPGKAPKLLIYTASILQNGVPSRFSGSGSGTDFTLTISSLQPEDFA |
| | NE10- | TYYCLQTYTTPDFGPGTKVEIKTTTPAPRPPTPAPTIASQPLSLRPEACRPAAGGAVHTR |
| | 19WD | GLDFACDIYIWAPLAGTCGVLLLSLVITLYCKRGRKKLLYIFKQPFMRPVQTTQEEDGCS |
| | R001- | CRFPEEEEGGCELRVKFSRSADAPAYKQGQNQLYNELNLGRREEYDVLDKRRGRDPEMGG |
| | G2126171) | KPRRKNPQEGLYNELQKDKMAEAYSEIGMKGERRRGKGHDGLYQGLSTATKDTYDALHMQ |
| | | ALPPR |
| SEQ ID | M12 | QVQLVQSGAEVKKPGASVKVSCKASGYTFTGYYMHWVRQAPGQGLEWMGRINPNSGGTNY |
| NO: | (ScFv | AQKFQGRVTMTTDTSTSTAYMELRSLRSDDTAVYYCARTTTSYAFDIWGQGTMVTVSSGG |
| 1533 | domain) | GGSGGGGSGGGGSGGGGSDIQLTQSPSTLSASVGDRVTITCRASQSISTWLAWYQQKPGK |
| | | APNLLIYKASTLESGVPSRFSGSGSGTEFTLTISSLQPDDFATYYCQQYNTYSPYTFGQG |
| | | TKLEIK |
| SEQ ID | M12 | MALPVTALLLPLALLLHAARPQVQLVQSGAEVKKPGASVKVSCKASGYTFTGYYMHWVRQ |
| NO: | >DE12- | APGQGLEWMGRINPNSGGTNYAQKFQGRVTMTTDTSTSTAYMELRSLRSDDTAVYYCART |
| 1534 | 14RD | TTSYAFDIWGQGTMVTVSSGGGGSGGGGSGGGGSGGGGSDIQLTQSPSTLSASVGDRVTI |
| | (M12 | TCRASQSISTWLAWYQQKPGKAPNLLIYKASTLESGVPSRFSGSGSGTEFTLTISSLQPD |
| | DE12- | DFATYYCQQYNTYSPYTFGQGTKLEIKTTTPAPRPPTPAPTIASQPLSLRPEACRPAAGG |
| | 14RD | AVHTRGLDFACDIYIWAPLAGTCGVLLLSLVITLYCKRGRKKLLYIFKQPFMRPVQTTQE |
| | R001- | EDGCSCRFPEEEEGGCELRVKFSRSADAPAYKQGQNQLYNELNLGRREEYDVLDKRRGRD |
| | G9126172) | PEMGGKPRRKNPQEGLYNELQKDKMAEAYSEIGMKGERRRGKGHDGLYQGLSTATKDTYD |
| | | ALHMQALPPR |
| SEQ ID | M13 | QVQLVQSGGGLVKPGGSLRLSCEASGFIFSDYYMGWIRQAPGKGLEWVSYIGRSGSSMYY |
| NO: | (ScFv | ADSVKGRFTFSRDNAKNSLYLQMNSLRAEDTAVYYCAASPVVAATEDFQHWGQGTLVTVS |
| 1535 | domain) | SGGGGSGGGGSGGGGSGGGGSDIVMTQTPATLSLSPGERATLSCRASQSVTSNYLAWYQQ |
| | | KPGQAPRLLLFGASTRATGIPDRFSGSGSGTDFTLTINRLEPEDFAMYYCQQYGSAPVTF |
| | | GQGTKLEIK |
| SEQ ID | M13 | MALPVTALLLPLALLLHAARPQVQLVQSGGGLVKPGGSLRLSCEASGFIFSDYYMGWIRQ |
| NO: | >TE13- | APGKGLEWVSYIGRSGSSMYYADSVKGRFTFSRDNAKNSLYLQMNSLRAEDTAVYYCAAS |
| 1536 | 19LD | PVVAATEDFQHWGQGTLVTVSSGGGGSGGGGSGGGGSGGGGSDIVMTQTPATLSLSPGER |
| | (M13 | ATLSCRASQSVTSNYLAWYQQKPGQAPRLLLFGASTRATGIPDRFSGSGSGTDFTLTINR |
| | TE13- | LEPEDFAMYYCQQYGSAPVTFGQGTKLEIKTTTPAPRPPTPAPTIASQPLSLRPEACRPA |
| | 19LD | AGGAVHTRGLDFACDIYIWAPLAGTCGVLLLSLVITLYCKRGRKKLLYIFKQPFMRPVQT |
| | R002- | TQEEDGCSCRFPEEEEGGCELRVKFSRSADAPAYKQGQNQLYNELNLGRREEYDVLDKRR |
| | C3126173) | GRDPEMGGKPRRKNPQEGLYNELQKDKMAEAYSEIGMKGERRRGKGHDGLYQGLSTATKD |
| | | TYDALHMQALPPR |
| SEQ ID | M14 | QVQLVQSGAEVRAPGASVKISCKASGFTFRGYYIHWVRQAPGQGLEWMGIINPSGGSRAY |
| NO: | (ScFv | AQKFQGRVTMTRDTSTSTVYMELSSLRSDDTAMYYCARTASCGGDCYYLDYWGQGTLVTV |
| 1537 | domain) | SSGGGGSGGGGSGGGGSGGGGSDIQMTQSPPTLSASVGDRVTITCRASENVNIWLAWYQQ |
| | | KPGKAPKLLIYKSSSLASGVPSRFSGSGSGAEFTLTISSLQPDDFATYYCQQYQSYPLTF |
| | | GGGTKVDIK |
| SEQ ID | M14 | MALPVTALLLPLALLLHAARPQVQLVQSGAEVRAPGASVKISCKASGFTFRGYYIHWVRQ |
| NO: | >BS83- | APGQGLEWMGIINPSGGSRAYAQKFQGRVTMTRDTSTSTVYMELSSLRSDDTAMYYCART |
| 1538 | 95ID | ASCGGDCYYLDYWGQGTLVTVSSGGGGSGGGGSGGGGSGGGGSDIQMTQSPPTLSASVGD |
| | (M14 | RVTITCRASENVNIWLAWYQQKPGKAPKLLIYKSSSLASGVPSRFSGSGSGAEFTLTISS |
| | BS83- | LQPDDFATYYCQQYQSYPLTFGGGTKVDIKTTTPAPRPPTPAPTIASQPLSLRPEACRPA |
| | 95ID | AGGAVHTRGLDFACDIYIWAPLAGTCGVLLLSLVITLYCKRGRKKLLYIFKQPFMRPVQT |
| | R001- | TQEEDGCSCRFPEEEEGGCELRVKFSRSADAPAYKQGQNQLYNELNLGRREEYDVLDKRR |
| | E8126174) | GRDPEMGGKPRRKNPQEGLYNELQKDKMAEAYSEIGMKGERRRGKGHDGLYQGLSTATKD |
| | | TYDALHMQALPPR |
| SEQ ID | M15 | QVQLVQSGGGLVQPGRSLRLSCAASGFTFDDYAMHWVRQAPGKGLEWVSGISWNSGSIGY |
| NO: | (ScFv | ADSVKGRFTISRDNAKNSLYLQMNSLRAEDTAVYYCAKDGSSSWSWGYFDYWGQGTLVTV |
| 1539 | domain) | SSGGGGSGGGGSGGGGSSSELTQDPAVSVALGQTVRTTCQGDALRSYYASWYQQKPGQAP |
| | | MLVIYGKNNRPSGIPDRFSGSDSGDTASLTITGAQAEDEADYYCNSRDSSGYPVFGTGTK |
| | | VTVL |
| SEQ ID | M15 | MALPVTALLLPLALLLHAARPQVQLVQSGGGLVQPGRSLRLSCAASGFTFDDYAMHWVRQ |
| NO: | >HS86- | APGKGLEWVSGISWNSGSIGYADSVKGRFTISRDNAKNSLYLQMNSLRAEDTAVYYCAKD |
| 1540 | 94XD | GSSSWSWGYFDYWGQGTLVTVSSGGGGSGGGGSGGGGSSSELTQDPAVSVALGQTVRTTC |
| | (M15 | QGDALRSYYASWYQQKPGQAPMLVIYGKNNRPSGIPDRFSGSDSGDTASLTITGAQAEDE |
| | HS86- | ADYYCNSRDSSGYPVFGTGTKVTVLTTTPAPRPPTPAPTIASQPLSLRPEACRPAAGGAV |
| | 94XD | HTRGLDFACDIYIWAPLAGTCGVLLLSLVITLYCKRGRKKLLYIFKQPFMRPVQTTQEED |
| | NT | GCSCRFPEEEEGGCELRVKFSRSADAPAYKQGQNQLYNELNLGRREEYDVLDKRRGRDPE |
| | 127553) | MGGKPRRKNPQEGLYNELQKDKMAEAYSEIGMKGERRRGKGHDGLYQGLSTATKDTYDAL |
| | | HMQALPPR |
| SEQ ID | M16 | EVQLVESGGGLVQPGRSLRLSCAASGFTFDDYAMHWVRQAPGKGLEWVSGISWNSGSTGY |
| NO: | (ScFv | ADSVKGRFTISRDNAKNSLYLQMNSLRAEDTALYYCAKDSSSWYGGGSAFDIWGQGTMVT |
| 1541 | domain) | VSSGGGGSGGGGSGGGGSSSELTQEPAVSVALGQTVRITCQGDSLRSYYASWYQQKPGQA |
| | | PVLVIFGRSRRPSGIPDRFSGSSSGNTASLIITGAQAEDEADYYCNSRDNTANHYVFGTG |
| | | TKLTVL |
| SEQ ID | M16 | MALPVTALLLPLALLLHAARPEVQLVESGGGLVQPGRSLRLSCAASGFTFDDYAMHWVRQ |
| NO: | >XS87- | APGKGLEWVSGISWNSGSTGYADSVKGRFTISRDNAKNSLYLQMNSLRAEDTALYYCAKD |
| 1542 | 99RD | SSSWYGGGSAFDIWGQGTMVTVSSGGGGSGGGGSGGGGSSSELTQEPAVSVALGQTVRIT |
| | (M16 | CQGDSLRSYYASWYQQKPGQAPVLVIFGRSRRPSGIPDRFSGSSSGNTASLIITGAQAED |
| | XS87- | EADYYCNSRDNTANHYVFGTGTKLTVLTTTPAPRPPTPAPTIASQPLSLRPEACRPAAGG |
| | 99RD | AVHTRGLDFACDIYIWAPLAGTCGVLLLSLVITLYCKRGRKKLLYIFKQPFMRPVQTTQE |
| | NT | EDGCSCRFPEEEEGGCELRVKFSRSADAPAYKQGQNQLYNELNLGRREEYDVLDKRRGRD |
| | 127554) | PEMGGKPRRKNPQEGLYNELQKDKMAEAYSEIGMKGERRRGKGHDGLYQGLSTATKDTYD |
| | | ALHMQALPPR |
| SEQ ID | M17 | EVQLVESGGGLVQPGRSLRLSCAASGFTFDDYAMHWVRQAPGKGLEWVSGISWNSGSTGY |
| NO: | (ScFv | ADSVKGRFTISRDNAKNSLYLQMNSLRAEDTALYYCAKDSSSWYGGGSAFDIWGQGTMVT |
| 1543 | domain) | VSSGGGGSGGGGSGGGGSSSELTQDPAVSVALGQTVRITCQGDSLRSYYASWYQQKPGQA |
| | | PVLVIYGKNNRPSGIPDRFSGSSSGNTASLTITGAQAEDEADYYCNSRGSSGNHYVFGTG |
| | | TKVTVL |
| SEQ ID | M17 | MALPVTALLLPLALLLHAARPEVQLVESGGGLVQPGRSLRLSCAASGFTFDDYAMHWVRQ |
| NO: | >NS89- | APGKGLEWVSGISWNSGSTGYADSVKGRFTISRDNAKNSLYLQMNSLRAEDTALYYCAKD |
| 1544 | 94MD | SSSWYGGGSAFDIWGQGTMVTVSSGGGGSGGGGSGGGGSSSELTQDPAVSVALGQTVRIT |
| | (M17 | CQGDSLRSYYASWYQQKPGQAPVLVIYGKNNRPSGIPDRFSGSSSGNTASLTITGAQAED |
| | NS89- | EADYYCNSRGSSGNHYVFGTGTKVTVLTTTPAPRPPTPAPTIASQPLSLRPEACRPAAGG |
| | 94MD | AVHTRGLDFACDIYIWAPLAGTCGVLLLSLVITLYCKRGRKKLLYIFKQPFMRPVQTTQE |
| | NT | EDGCSCRFPEEEEGGCELRVKFSRSADAPAYKQGQNQLYNELNLGRREEYDVLDKRRGRD |
| | 127555) | PEMGGKPRRKNPQEGLYNELQKDKMAEAYSEIGMKGERRRGKGHDGLYQGLSTATKDTYD |
| | | ALHMQALPPR |
| SEQ ID | M18 | QVQLVQSGGGLVQPGGSLRLSCAASGFTFSSYWMHWVRQAPGKGLVWVSRINSDGSSTSY |
| NO: | (ScFv | ADSVKGRFTISRDNAKNTLYLQMNSLRAEDTAVYYCVRTGWVGSYYYYMDVWGKGTTVTV |
| 1545 | domain) | SSGGGGSGGGGSGGGGSGGGGSEIVLTQSPGTLSLSPGERATLSCRASQSVSSNYLAWYQ |
| | | QKPGQPPRLLIYDVSTRATGIPARFSGGGSGTDFTLTISSLEPEDFAVYYCQQRSNWPPW |
| | | TFGQGTKVEIK |
| SEQ ID | M18 | MALPVTALLLPLALLLHAARPQVQLVQSGGGLVQPGGSLRLSCAASGFTFSSYWMHWVRQ |
| NO: | >DS90- | APGKGLVWVSRINSDGSSTSYADSVKGRFTISRDNAKNTLYLQMNSLRAEDTAVYYCVRT |
| 1546 | 09HD | GWVGSYYYYMDVWGKGTTVTVSSGGGGSGGGGSGGGGSGGGGSEIVLTQSPGTLSLSPGE |
| | (M18 | RATLSCRASQSVSSNYLAWYQQKPGQPPRLLIYDVSTRATGIPARFSGGGSGTDFTLTIS |
| | DS90- | SLEPEDFAVYYCQQRSNWPPWTFGQGTKVEIKTTTPAPRPPTPAPTIASQPLSLRPEACR |
| | 09HD | PAAGGAVHTRGLDFACDIYIWAPLAGTCGVLLLSLVITLYCKRGRKKLLYIFKQPFMRPV |
| | R003- | QTTQEEDGCSCRFPEEEEGGCELRVKFSRSADAPAYKQGQNQLYNELNLGRREEYDVLDK |
| | A05127556) | RRGRDPEMGGKPRRKNPQEGLYNELQKDKMAEAYSEIGMKGERRRGKGHDGLYQGLSTAT |
| | | KDTYDALHMQALPPR |
| SEQ ID | M19 | QVQLVQSGGGVVQPGRSLRLSCAASGFTFSSYGMHWVRQAPGKGLEWVAVISYDGSNKYY |
| NO: | (ScFv | ADSVKGRFTISRDNSKNTLYLQMNSLRAEDTAVYYCAKGYSRYYYYGMDVWGQGTTVTVS |
| 1547 | domain) | SGGGGSGGGGSGGGGSGGGGSEIVMTQSPATLSLSPGERAILSCRASQSVYTKYLGWYQQ |
| | | KPGQAPRLLIYDASTRATGIPDRFSGSGSGTDFTLTINRLEPEDFAVYYCQHYGGSPLIT |
| | | FGQGTKVDIK |
| SEQ ID | M19 | MALPVTALLLPLALLLHAARPQVQLVQSGGGVVQPGRSLRLSCAASGFTFSSYGMHWVRQ |
| NO: | >TS92- | APGKGLEWVAVISYDGSNKYYADSVKGRFTISRDNSKNTLYLQMNSLRAEDTAVYYCAKG |
| 1548 | 04BD | YSRYYYYGMDVWGQGTTVTVSSGGGGSGGGGSGGGGSGGGGSEIVMTQSPATLSLSPGER |
| | (M19 | AILSCRASQSVYTKYLGWYQQKPGQAPRLLIYDASTRATGIPDRFSGSGSGTDFTLTINR |
| | TS92- | LEPEDFAVYYCQHYGGSPLITFGQGTKVDIKTTTPAPRPPTPAPTIASQPLSLRPEACRP |
| | 04BD | AAGGAVHTRGLDFACDIYIWAPLAGTCGVLLLSLVITLYCKRGRKKLLYIFKQPFMRPVQ |
| | R003- | TTQEEDGCSCRFPEEEEGGCELRVKFSRSADAPAYKQGQNQLYNELNLGRREEYDVLDKR |
| | C06127557) | RGRDPEMGGKPRRKNPQEGLYNELQKDKMAEAYSEIGMKGERRRGKGHDGLYQGLSTATK |
| | | DTYDALHMQALPPR |
| SEQ ID | M20 | QVQLVQSGGGLVQPGGSLRLSCAASGFTFSSYAMSWVRQAPGKGLEWVSAISGSGGSTYY |
| NO: | (ScFv | ADSVKGRFTISRDNSKNTLYLQMNSLRAEDTAVYYCAKREAAAGHDWYFDLWGRGTLVTV |
| 1549 | domain) | SSGGGGSGGGGSGGGGSGGGGSDIRVTQSPSSLSASVGDRVTITCRASQSISSYLNWYQQ |
| | | KPGKAPKLLIYAASSLQSGVPSRFSGSGSGTDFTLTISSLQPEDFATYYCQQSYSIPLTF |
| | | GQGTKVEIK |
| SEQ ID | M20 (full) | MALPVTALLLPLALLLHAARPQVQLVQSGGGLVQPGGSLRLSCAASGFTFSSYAMSWVRQ |
| NO: | >JS93- | APGKGLEWVSAISGSGGSTYYADSVKGRFTISRDNSKNTLYLQMNSLRAEDTAVYYCAKR |
| 1550 | 08WD | EAAAGHDWYFDLWGRGTLVTVSSGGGGSGGGGSGGGGSGGGGSDIRVTQSPSSLSASVGD |
| | (M20 | RVTITCRASQSISSYLNWYQQKPGKAPKLLIYAASSLQSGVPSRFSGSGSGTDFTLTISS |
| | JS93- | LQPEDFATYYCQQSYSIPLTFGQGTKVEIKTTTPAPRPPTPAPTIASQPLSLRPEACRPA |
| | 08WD | AGGAVHTRGLDFACDIYIWAPLAGTCGVLLLSLVITLYCKRGRKKLLYIFKQPFMRPVQT |
| | R003- | TQEEDGCSCRFPEEEEGGCELRVKFSRSADAPAYKQGQNQLYNELNLGRREEYDVLDKRR |
| | E07127558) | GRDPEMGGKPRRKNPQEGLYNELQKDKMAEAYSEIGMKGERRRGKGHDGLYQGLSTATKD |
| | | TYDALHMQALPPR |
| SEQ ID | M21 | QVQLVQSWAEVKKPGASVKVSCKASGYTFTSYYMHWVRQAPGQGLEWMGIINPSGGSTSY |
| NO: | (ScFv | AQKFQGRVTMTRDTSTSTVYMELSNLRSEDTAVYYCARSPRVTTGYFDYWGQGTLVTVSS |
| 1551 | domain) | GGGGSGGGGSGGGGSGGGGSDIQLTQSPSTLSASVGDRVTITCRASQSISSWLAWYQQKP |
| | | GKAPKLLIYKASSLESGVPSRFSGSGSGTEFTLTISSLQPDDFATYYCQQYSSYPLTFGG |
| | | GTRLEIK |
| SEQ ID | M21 (full | MALPVTALLLPLALLLHAARPQVQLVQSWAEVKKPGASVKVSCKASGYTFTSYYMHWVRQ |
| NO: | CAR) | APGQGLEWMGIINPSGGSTSYAQKFQGRVTMTRDTSTSTVYMELSNLRSEDTAVYYCARS |
| 1552 | | PRVTTGYFDYWGQGTLVTVSSGGGGSGGGGSGGGGSGGGGSDIQLTQSPSTLSASVGDRV |
| | | TITCRASQSISSWLAWYQQKPGKAPKLLIYKASSLESGVPSRFSGSGSGTEFTLTISSLQ |
| | | PDDFATYYCQQYSSYPLTFGGGTRLEIKTTTPAPRPPTPAPTIASQPLSLRPEACRPA |
| | | AGGAVHTRGLDFACDIYIWAPLAGTCGVLLLSLVITLYCKRGRKKLLYIFKQPFMRPVQT |
| | | TQEEDGCSCRFPEEEEGGCELRVKFSRSADAPAYKQGQNQLYNELNLGRREEYDVLDKRR |
| | | GRDPEMGGKPRRKNPQEGLYNELQKDKMAEAYSEIGMKGERRRGKGHDGLYQGLSTATKD |
| | | TYDALHMQALPPR |
| SEQ ID | M22 | QVQLVQSGAEVRRPGASVKISCRASGDTSTRHYIHWLRQAPGQGPEWMGVINPTTGPATG |
| NO: | (ScFv | SPAYAQMLQGRVTMTRDTSTRTVYMELRSLRFEDTAVYYCARSVVGRSAPYYFDYWGQGT |
| 1553 | domain) | LVTVSSGGGGSGGGGSGGGGSGGGGSDIQMTQSPSSLSASVGDRVTITCRASQGISDYSA |
| | | WYQQKPGKAPKLLIYAASTLQSGVPSRFSGSGSGTDFTLTISYLQSEDFATYYCQQYYSY |
| | | PLTFGGGTKVDIK |
| SEQ ID | M22 (full | MALPVTALLLPLALLLHAARPQVQLVQSGAEVRRPGASVKISCRASGDTSTRHYIHWLRQ |
| NO: | CAR) | APGQGPEWMGVINPTTGPATGSPAYAQMLQGRVTMTRDTSTRTVYMELRSLRFEDTAVYY |
| 1554 | | CARSVVGRSAPYYFDYWGQGTLVTVSSGGGGSGGGGSGGGGSGGGGSDIQMTQSPSSLSA |
| | | SVGDRVTITCRASQGISDYSAWYQQKPGKAPKLLIYAASTLQSGVPSRFSGSGSGTDFTL |
| | | TISYLQSEDFATYYCQQYYSYPLTFGGGTKVDIKTTTPAPRPPTPAPTIASQPLSLRPEA |
| | | CRPAAGGAVHTRGLDFACDIYIWAPLAGTCGVLLLSLVITLYCKRGRKKLLYIFKQPFMR |
| | | PVQTTQEEDGCSCRFPEEEEGGCELRVKFSRSADAPAYKQGQNQLYNELNLGRREEYDVL |
| | | DKRRGRDPEMGGKPRRKNPQEGLYNELQKDKMAEAYSEIGMKGERRRGKGHDGLYQGLST |
| | | ATKDTYDALHMQALPPR |
| SEQ ID | M23 | QVQLQQSGAEVKKPGASVKVSCKASGYTFTNYYMHWVRQAPGQGLEWMGIINPSGGYTTY |
| NO: | (ScFv | AQKFQGRLTMTRDTSTSTVYMELSSLRSEDTAVYYCARIRSCGGDCYYFDNWGQGTLVTV |
| 1555 | domain) | SSGGGGSGGGGSGGGGSGGGGSDIQLTQSPSTLSASVGDRVTITCRASENVNIWLAWYQQ |
| | | KPGKAPKLLIYKSSSLASGVPSRFSGSGSGAEFTLTISSLQPDDFATYYCQQYQSYPLTF |
| | | GGGTKVDIK |
| SEQ ID | M23 (full | MALPVTALLLPLALLLHAARPQVQLQQSGAEVKKPGASVKVSCKASGYTFTNYYMHWVRQ |
| NO: | CAR) | APGQGLEWMGIINPSGGYTTYAQKFQGRLTMTRDTSTSTVYMELSSLRSEDTAVYYCARI |
| 1556 | | RSCGGDCYYFDNWGQGTLVTVSSGGGGSGGGGSGGGGSGGGGSDIQLTQSPSTLSASVGD |
| | | RVTITCRASENVNIWLAWYQQKPGKAPKLLIYKSSSLASGVPSRFSGSGSGAEFTLTISS |
| | | LQPDDFATYYCQQYQSYPLTFGGGTKVDIKTTTPAPRPPTPAPTIASQPLSLRPEACRPA |
| | | AGGAVHTRGLDFACDIYIWAPLAGTCGVLLLSLVITLYCKRGRKKLLYIFKQPFMRPVQT |
| | | TQEEDGCSCRFPEEEEGGCELRVKFSRSADAPAYKQGQNQLYNELNLGRREEYDVLDKRR |
| | | GRDPEMGGKPRRKNPQEGLYNELQKDKMAEAYSEIGMKGERRRGKGHDGLYQGLSTATKD |
| | | TYDALHMQALPPR |
| SEQ ID | M24 | QITLKESGPALVKPTQTLTLTCTFSGFSLSTAGVHVGWIRQPPGKALEWLALISWADDKR |
| NO: | (ScFv | YRPSLRSRLDITRVTSKDQVVLSMTNMQPEDTATYYCALQGFDGYEANWGPGTLVTVSSG |
| 1557 | domain) | GGGSGGGGSGGGGSGGGGSDIVMTQSPSSLSASAGDRVTITCRASRGISSALAWYQQKPG |
| | | KPPKLLIYDASSLESGVPSRFSGSGSGTDFTLTIDSLEPEDFATYYCQQSYSTPWTFGQG |
| | | TKVDIK |
| SEQ ID | M24 (full | MALPVTALLLPLALLLHAARPQITLKESGPALVKPTQTLTLTCTFSGFSLSTAGVHVGWI |
| NO: | CAR) | RQPPGKALEWLALISWADDKRYRPSLRSRLDITRVTSKDQVVLSMTNMQPEDTATYYCAL |
| 1558 | | QGFDGYEANWGPGTLVTVSSGGGGSGGGGSGGGGSGGGGSDIVMTQSPSSLSASAGDRVT |
| | | ITCRASRGISSALAWYQQKPGKPPKLLIYDASSLESGVPSRFSGSGSGTDFTLTIDSLEP |
| | | EDFATYYCQQSYSTPWTFGQGTKVDIKTTTPAPRPPTPAPTIASQPLSLRPEACRPA |
| | | AGGAVHTRGLDFACDIYIWAPLAGTCGVLLLSLVITLYCKRGRKKLLYIFKQPFMRPVQT |
| | | TQEEDGCSCRFPEEEEGGCELRVKFSRSADAPAYKQGQNQLYNELNLGRREEYDVLDKRR |
| | | GRDPEMGGKPRRKNPQEGLYNELQKDKMAEAYSEIGMKGERRRGKGHDGLYQGLSTATKD |
| | | TYDALHMQALPPR |
| SEQ ID | Ss1 (scFv | QVQLQQSGPELEKPGASVKISCKASGYSFTGYTMNWVKQSHGKSLEWIGLITPYNGASS |
| NO: | domain) | YNQKFRGKATLTVDKSSSTAYMDLLSLTSEDSAVYFCARGGYDGRGFDYWGQGTTVTVS |
| 1559 | | SGGGGSGGGGSGGGGSDIELTQSPAIMSASPGEKVTMTCSASSSVSYMHWYQQKSGTSP |
| | | KRWIYDTSKLASGVPGRFSGSGSGNSYSLTISSVEAEDDATYYCQQWSGYPLTFGAGTK |
| | | LEI |
| SEQ ID | Ss1 (full | MALPVTALLLPLALLLHAARPQVQLQQSGPELEKPGASVKISCKASGYSFTGYTMNWVK |
| NO: | CAR) | QSHGKSLEWIGLITPYNGASSYNQKFRGKATLTVDKSSSTAYMDLLSLTSEDSAVYFCA |
| 1560 | | RGGYDGRGFDYWGQGTTVTVSSGGGGSGGGGSGGGGSDIELTQSPAIMSASPGEKVTMT |
| | | CSASSSVSYMHWYQQKSGTSPKRWIYDTSKLASGVPGRFSGSGSGNSYSLTISSVEAED |
| | | DATYYCQQWSGYPLTFGAGTKLEITTTPAPRPPTPAPTIASQPLSLRPEACRPAAGGAV |
| | | HTRGLDFACDIYIWAPLAGTCGVLLLSLVITLYCKRGRKKLLYIFKQPFMRPVQTTQEE |
| | | DGCSCRFPEEEEGGCELRVKFSRSADAPA |

### BCMA CAR

[1065] In other embodiments, the CAR-expressing cells can specifically bind to BCMA, e.g., can include a CAR molecule, or an antigen binding domain according to Table 1 or 16, SEQ ID NO: 271 or SEQ ID NO: 273 of WO2016/014565, incorporated herein by reference. The amino acid and nucleotide sequences encoding the BCMA CAR molecules and antigen binding domains (e.g., including one, two, three VH CDRs; and one, two, three VL CDRs according to Kabat or Chothia), as specified in WO2016/014565, are provided in Tables 15-18 herein.

```
TABLE 15
Heavy Chain Variable Domain CDRs according to the Kabat
  numbering scheme (Kabat et al. (1991), “Sequences of
  Proteins of Immunological Interest,” 5^{th} Ed. Public Health
Service, National Institutes of Health, Bethesda, MD)
```

| | | SEQ ID | | SEQ ID | | SEQ ID |
|---|---|---|---|---|---|---|
| Candidate | HCDR1 | NO | HCDR2 | NO | HCDR3 | NO |
| 139109 | NHGMS | 412 | GIVYSGSTYYAA | 431 | HGGESDV | 453 |
| | | | SVKG | | | |
| 139103 | NYAMS | 413 | GISRSGENTYYA | 432 | SPAHYYGGMD | 454 |
| | | | DSVKG | | V | |
| 139105 | DYAMH | 414 | GISWNSGSIGYA | 433 | HSFLAY | 455 |
| | | | DSVKG | | | |
| 139111 | NHGMS | 412 | GIVYSGSTYYAA | 431 | HGGESDV | 453 |
| | | | SVKG | | | |
| 139100 | NFGIN | 415 | WINPKNNNTNY | 434 | GPYYYQSYMD | 456 |
| | | | AQKFQG | | V | |
| 139101 | SDAMT | 416 | VISGSGGTTYYA | 435 | LDSSGYYYARG | 457 |
| | | | DSVKG | | PRY | |
| 139102 | NYGIT | 417 | WISAYNGNTNY | 436 | GPYYYYMDV | 458 |
| | | | AQKFQG | | | |
| 139104 | NHGMS | 412 | GIVYSGSTYYAA | 431 | HGGESDV | 453 |
| | | | SVKG | | | |
| 139106 | NHGMS | 412 | GIVYSGSTYYAA | 431 | HGGESDV | 453 |
| | | | SVKG | | | |
| 139107 | NHGMS | 412 | GIVYSGSTYYAA | 431 | HGGESDV | 453 |
| | | | SVKG | | | |
| 139108 | DYYMS | 418 | YISSSGSTIYYAD | 437 | ESGDGMDV | 459 |
| | | | SVKG | | | |
| 139110 | DYYMS | 418 | YISSSGNTIYYAD | 438 | STMVREDY | 460 |
| | | | SVKG | | | |
| 139112 | NHGMS | 412 | GIVYSGSTYYAA | 431 | HGGESDV | 453 |
| | | | SVKG | | | |
| 139113 | NHGMS | 412 | GIVYSGSTYYAA | 431 | HGGESDV | 453 |
| | | | SVKG | | | |
| 139114 | NHGMS | 412 | GIVYSGSTYYAA | 431 | HGGESDV | 453 |
| | | | SVKG | | | |
| 149362 | SSYYY | 419 | SIYYSGSAYYNP | 439 | HWQEWPDAFDI | 461 |
| | WG | | SLKS | | | |
| 149363 | TSGMC | 420 | RIDWDEDKFYST | 440 | SGAGGTSATAF | 462 |
| | VS | | SLKT | | DI | |
| 149364 | SYSMN | 421 | SISSSSSYIYYAD | 441 | TIAAVYAFDI | 463 |
| | | | SVKG | | | |
| 149365 | DYYMS | 418 | YISSSGSTIYYAD | 437 | DLRGAFDI | 464 |
| | | | SVKG | | | |
| 149366 | SHYIH | 422 | MINPSGGVTAYS | 442 | EGSGSGWYFDF | 465 |
| | | | QTLQG | | | |
| 149367 | SGGYY | 423 | YIYYSGSTYYNP | 443 | AGIAARLRGAF | 466 |
| | WS | | SLKS | | DI | |
| 149368 | SYAIS | 424 | GIIPIFGTANYAQ | 444 | RGGYQLLRWD | 467 |
| | | | KFQG | | VGLLRSAFDI | |
| 149369 | SNSAA | 425 | RTYYRSKWYSF | 445 | SSPEGLFLYWF | 468 |
| | WN | | YAISLKS | | DP | |
| BCMA_EBB- | SYAMS | 426 | AISGSGGSTYYA | 446 | VEGSGSLDY | 469 |
| C1978-A4 | | | DSVKG | | | |
| BCMA_EBB- | RYPMS | 427 | GISDSGVSTYYA | 447 | RAGSEASDI | 470 |
| C1978-G1 | | | DSAKG | | | |
| BCMA_EBB- | SYAMS | 426 | AISGSGGSTYYA | 446 | ATYKRELRYYY | 471 |
| C1979-C1 | | | DSVKG | | GMDV | |
| BCMA_EBB- | SYAMS | 426 | AISGSGGSTYYA | 446 | ATYKRELRYYY | 471 |
| C1978-C7 | | | DSVKG | | GMDV | |
| BCMA_EBB- | DYAMH | 414 | GISWNSGSIGYA | | | |
| C1978-D10 | | | DSVKG | 433 | VGKAVPDV | 472 |
| BCMA_EBB- | DYAMH | 414 | SINWKGNSLAY | 448 | HQGVAYYNYA | 473 |
| C1979-C12 | | | GDSVKG | | MDV | |
| BCMA_EBB- | SYAMS | 426 | AISGSGGSTYYA | 446 | VVRDGMDV | 474 |
| C1980-G4 | | | DSVKG | | | |
| BCMA_EBB- | SYAMS | 426 | AISGSGGSTYYA | 446 | IPQTGTFDY | 475 |
| C1980-D2 | | | DSVKG | | | |
| BCMA_EBB- | SYAMS | 426 | AISGSGGSTYYA | 446 | ANYKRELRYYY | 476 |
| C1978-A10 | | | DSVKG | | GMDV | |
| BCMA_EBB- | SYAMS | 426 | AISGSGGSTYYA | 446 | ALVGATGAFDI | 477 |
| C1978-D4 | | | DSVKG | | | |
| BCMA_EBB- | SYAMS | 426 | AISGSGGSTYYA | 446 | WFGEGFDP | 478 |
| C1980-A2 | | | DSVKG | | | |
| BCMA_EBB- | SYAMS | 426 | AISGSGGSTYYA | 446 | VGYDSSGYYRD | 479 |
| C1981-C3 | | | DSVKG | | YYGMDV | |
| BCMA_EBB- | SYAMS | 426 | AISGSGGSTYYA | 446 | MGWSSGYLGA | 480 |
| C1978-G4 | | | DSVKG | | FDI | |
| A7D12.2 | NFGMN | 428 | WINTYTGESYFA | 449 | GEIYYGYDGGF | 481 |
| | | | DDFKG | | AY | |
| C11D5.3 | DYSIN | 429 | WINTETREPAYA | 450 | DYSYAMDY | 482 |
| | | | YDFRG | | | |
| C12A3.2 | HYSMN | 430 | RINTESGVPIYAD | 451 | DYLYSLDF | 483 |
| | | | DFKG | | | |
| C13F12.1 | HYSMN | 430 | RINTETGEPLYA | 452 | DYLYSCDY | 484 |
| | | | DDFKG | | | |

TABLE 16
Light Chain Variable Domain CDRs according to the Kabat
numbering scheme (Kabat et al. (1991), “Sequences of
Proteins of Immunological Interest,” 5^{th} Ed. Public
Health Service, National Institutes of Health, Bethesda, MD)

| | | SEQ | | SEQ | | SEQ ID |
|---|---|---|---|---|---|---|
| Candidate | LCDR1 | ID NO | LCDR2 | ID NO | LCDR3 | NO |
| 139109 | RASQSISSYLN | 237 | AASSLQ | 240 | QQSYSTPYT | 545 |
| | | | S | | | |
| 139103 | RASQSISSSFLA | 485 | GASRRA | 516 | QQYHSSPSW | 546 |
| | | | T | | T | |
| 139105 | RSSQSLLHSNGYN | 486 | LGSNRA | 517 | MQALQTPY | 547 |
| | YLD | | S | | T | |
| 139111 | KSSQSLLRNDGKT | 487 | EVSNRF | 518 | MQNIQFPS | 548 |
| | PLY | | S | | | |
| 139100 | RSSQSLLHSNGYN | 488 | LGSKRA | 519 | MQALQTPY | 547 |
| | YLN | | S | | T | |
| 139101 | RASQSISSYLN | 237 | GASTLA | 520 | QQSYKRAS | 549 |
| | | | S | | | |
| 139102 | RSSQSLLYSNGYN | 489 | LGSNRA | 517 | MQGRQFPYS | 550 |
| | YVD | | S | | | |
| 139104 | RASQSVSSNLA | 490 | GASTRA | 521 | QQYGSSLT | 551 |
| | | | S | | | |
| 139106 | RASQSVSSKLA | 491 | GASIRAT | 522 | QQYGSSSWT | 552 |
| 139107 | RASQSVGSTNLA | 492 | DASNRA | 523 | QQYGSSPPW | 553 |
| | | | T | | T | |
| 139108 | RASQSISSYLN | 237 | AASSLQ | 240 | QQSYTLA | 554 |
| | | | S | | | |
| 139110 | KSSESLVHNSGKT | 493 | EVSNRD | 524 | MQGTHWPG | 555 |
| | YLN | | S | | T | |
| 139112 | QASEDINKFLN | 494 | DASTLQ | 525 | QQYESLPLT | 556 |
| | | | T | | | |
| 139113 | RASQSVGSNLA | 495 | GASTRA | 526 | QQYNDWLP | 557 |
| | | | T | | VT | |
| 139114 | RASQSIGSSSLA | 496 | GASSRA | 527 | QQYAGSPPF | 558 |
| | | | S | | T | |
| 149362 | KASQDIDDAMN | 497 | SATSPVP | 528 | LQHDNFPLT | 559 |
| 149363 | RASQDIYNNLA | 498 | AANKSQ | 529 | QHYYRFPYS | 560 |
| | | | S | | | |
| 149364 | RSSQSLLHSNGYN | 486 | LGSNRA | 517 | MQALQTPY | 547 |
| | YLD | | S | | T | |
| 149365 | GGNNIGTKSVH | 499 | DDSVRP | 530 | QVWDSDSE | 561 |
| | | | S | | HVV | |
| 149366 | SGDGLSKKYVS | 500 | RDKERP | 531 | QAWDDTTV | 562 |
| | | | S | | V | |
| 149367 | RASQGIRNWLA | 501 | AASNLQ | 532 | QKYNSAPFT | 563 |
| | | | S | | | |
| 149368 | GGNNIGSKSVH | 502 | GKNNRP | 533 | SSRDSSGDH | 564 |
| | | | S | | LRV | |
| 149369 | QGDSLGNYYAT | 503 | GTNNRP | 534 | NSRDSSGHH | 565 |
| | | | S | | LL | |
| BCMA_EBB- | RASQSVSSAYLA | 504 | GASTRA | 526 | QHYGSSFNG | 566 |
| C1978-A4 | | | T | | SSLFT | |
| BCMA_EBB- | RASQSVSNSLA | 505 | DASSRA | 535 | QQFGTSSGL | 567 |
| C1978-G1 | | | T | | T | |
| BCMA_EBB- | RASQSVSSSFLA | 506 | GASSRA | 536 | QQYHSSPSW | 546 |
| C1979-C1 | | | T | | T | |
| BCMA_EBB- | RASQSVSTTFLA | 507 | GSSNRA | 537 | QQYHSSPSW | 546 |
| C1978-C7 | | | T | | T | |
| BCMA_EBB- | RASQSISSYLN | 237 | AASSLQ | 240 | QQSYSTPYS | 568 |
| C1978-D10 | | | S | | | |
| BCMA_EBB- | RATQSIGSSFLA | 508 | GASQRA | 538 | QHYESSPSW | 569 |
| C1979-C12 | | | T | | T | |
| BCMA_EBB- | RASQSVSSSYLA | 509 | GASSRA | 536 | QQYGSPPRF | 570 |
| C1980-G4 | | | T | | T | |
| BCMA_EBB- | RASQSVSSSYLA | 509 | GASSRA | 536 | QHYGSSPSW | 571 |
| C1980-D2 | | | T | | T | |
| BCMA_EBB- | RASQRVASNYLA | 510 | GASSRA | 536 | QHYDSSPSW | 572 |
| C1978-A10 | | | T | | T | |
| BCMA_EBB- | RASQSLSSNFLA | 511 | GASNW | 539 | QYYGTSPM | 573 |
| C1978-D4 | | | AT | | YT | |
| BCMA_EBB- | RSSQSLLHSNGYN | 486 | LGSNRA | 517 | MQALQTPLT | 574 |
| C1980-A2 | YLD | | S | | | |
| BCMA_EBB- | RASQSVSSSYLA | 509 | GTSSRA | 540 | QHYGNSPPK | 575 |
| C1981-C3 | | | T | | FT | |
| BCMA_EBB- | RASQSVASSFLA | 512 | GASGRA | 541 | QHYGGSPRL | 576 |
| C1978-G4 | | | T | | T | |
| A7D12.2 | RASQDVNTAVS | 513 | SASYRY | 542 | QQHYSTPW | 577 |
| | | | T | | T | |
| C11D5.3 | RASESVSVIGAHLI | 514 | LASNLE | 543 | LQSRIFPRT | 578 |
| | H | | T | | | |
| Cl2A3.2 | RASESVTILGSHLI | 515 | LASNVQ | 544 | LQSRTIPRT | 579 |
| | Y | | T | | | |
| C13F12.1 | RASESVTILGSHLI | 515 | LASNVQ | 544 | LQSRTIPRT | 579 |
| | Y | | T | | | |

TABLE 17
Amino Acid and Nucleic Acid Sequences of exemplary
anti-BCMA scFv domains and BCMA CAR molecules. The amino acid
sequences variable heavy chain and variable light chain sequences
for each scFv is also provided.

| | | |
|---|---|---|
| Name/ | SEQ | |
| Description | ID NO: | Sequence |

139109

| | | |
|---|---|---|
| 139109-aa | 580 | EVQLVESGGGLVQPGGSLRLSCAVSGFALSNHGMSWVRRAPGKGLEWVSG |
| ScFv domain | | IVYSGSTYYAASVKGRFTISRDNSRNTLYLQMNSLRPEDTAIYYCSAHGG |
| | | ESDVWGQGTTVTVSSASGGGGSGGRASGGGGSDIQLTQSPSSLSASVGDR |
| | | VTITCRASQSISSYLNWYQQKPGKAPKLLIYAASSLQSGVPSRFSGSGSG |
| | | TDFTLTISSLQPEDFATYYCQQSYSTPYTFGQGTKVEIK |
| 139109-nt | 581 | GAAGTGCAATTGGTGGAATCAGGGGGAGGACTTGTGCAGCCTGGAGGATC |
| ScFv domain | | GCTGAGACTGTCATGTGCCGTGTCCGGCTTTGCCCTGTCCAACCACGGGA |
| | | TGTCCTGGGTCCGCCGCGCGCCTGGAAAGGGCCTCGAATGGGTGTCGGGT |
| | | ATTGTGTACAGCGGTAGCACCTACTATGCCGCATCCGTGAAGGGGAGATT |
| | | CACCATCAGCCGGGACAACTCCAGGAACACTCTGTACCTCCAAATGAATT |
| | | CGCTGAGGCCAGAGGACACTGCCATCTACTACTGCTCCGCGCATGGCGGA |
| | | GAGTCCGACGTCTGGGGACAGGGGACCACCGTGACCGTGTCTAGCGCGTC |
| | | CGGCGGAGGCGGCAGCGGGGGTCGGGCATCAGGGGGCGGCGGATCGGACA |
| | | TCCAGCTCACCCAGTCCCCGAGCTCGCTGTCCGCCTCCGTGGGAGATCGG |
| | | GTCACCATCACGTGCCGCGCCAGCCAGTCGATTTCCTCCTACCTGAACTG |
| | | GTACCAACAGAAGCCCGGAAAAGCCCCGAAGCTTCTCATCTACGCCGCCT |
| | | CGAGCCTGCAGTCAGGAGTGCCCTCACGGTTCTCCGGCTCCGGTTCCGGT |
| | | ACTGATTTCACCCTGACCATTTCCTCCCTGCAACCGGAGGACTTCGCTAC |
| | | TTACTACTGCCAGCAGTCGTACTCCACCCCCTACACTTTCGGACAAGGCA |
| | | CCAAGGTCGAAATCAAG |
| 139109-aa | 582 | EVQLVESGGGLVQPGGSLRLSCAVSGFALSNHGMSWVRRAPGKGLEWVSG |
| VH | | IVYSGSTYYAASVKGRFTISRDNSRNTLYLQMNSLRPEDTAIYYCSAHGG |
| | | ESDVWGQGTTVTVSS |
| 139109-aa | 583 | DIQLTQSPSSLSASVGDRVTITCRASQSISSYLNWYQQKPGKAPKLLIYA |
| VL | | ASSLQSGVPSRFSGSGSGTDFTLTISSLQPEDFATYYCQQSYSTPYTFGQ |
| | | GTKVEIK |
| 139109-aa | 584 | MALPVTALLLPLALLLHAARPEVQLVESGGGLVQPGGSLRLSCAVSGFAL |
| Full CAR | | SNHGMSWVRRAPGKGLEWVSGIVYSGSTYYAASVKGRFTISRDNSRNTLY |
| | | LQMNSLRPEDTAIYYCSAHGGESDVWGQGTTVTVSSASGGGGSGGRASGG |
| | | GGSDIQLTQSPSSLSASVGDRVTITCRASQSISSYLNWYQQKPGKAPKLL |
| | | IYAASSLQSGVPSRFSGSGSGTDFTLTISSLQPEDFATYYCQQSYSTPYT |
| | | FGQGTKVEIKTTTPAPRPPTPAPTIASQPLSLRPEACRPAAGGAVHTRGL |
| | | DFACDIYIWAPLAGTCGVLLLSLVITLYCKRGRKKLLYIFKQPFMRPVQT |
| | | TQEEDGCSCRFPEEEEGGCELRVKFSRSADAPAYKQGQNQLYNELNLGRR |
| | | EEYDVLDKRRGRDPEMGGKPRRKNPQEGLYNELQKDKMAEAYSEIGMKGE |
| | | RRRGKGHDGLYQGLSTATKDTYDALHMQALPPR |
| 139109-nt | 585 | ATGGCCCTCCCTGTCACCGCCCTGCTGCTTCCGCTGGCTCTTCTGCTCCA |
| Full CAR | | CGCCGCTCGGCCCGAAGTGCAATTGGTGGAATCAGGGGGAGGACTTGTGC |
| | | AGCCTGGAGGATCGCTGAGACTGTCATGTGCCGTGTCCGGCTTTGCCCTG |
| | | TCCAACCACGGGATGTCCTGGGTCCGCCGCGCGCCTGGAAAGGGCCTCGA |
| | | ATGGGTGTCGGGTATTGTGTACAGCGGTAGCACCTACTATGCCGCATCCG |
| | | TGAAGGGGAGATTCACCATCAGCCGGGACAACTCCAGGAACACTCTGTAC |
| | | CTCCAAATGAATTCGCTGAGGCCAGAGGACACTGCCATCTACTACTGCTC |
| | | CGCGCATGGCGGAGAGTCCGACGTCTGGGGACAGGGGACCACCGTGACCG |
| | | TGTCTAGCGCGTCCGGCGGAGGCGGCAGCGGGGGTCGGGCATCAGGGGGC |
| | | GGCGGATCGGACATCCAGCTCACCCAGTCCCCGAGCTCGCTGTCCGCCTC |
| | | CGTGGGAGATCGGGTCACCATCACGTGCCGCGCCAGCCAGTCGATTTCCT |
| | | CCTACCTGAACTGGTACCAACAGAAGCCCGGAAAAGCCCCGAAGCTTCTC |
| | | ATCTACGCCGCCTCGAGCCTGCAGTCAGGAGTGCCCTCACGGTTCTCCGG |
| | | CTCCGGTTCCGGTACTGATTTCACCCTGACCATTTCCTCCCTGCAACCGG |
| | | AGGACTTCGCTACTTACTACTGCCAGCAGTCGTACTCCACCCCCTACACT |
| | | TTCGGACAAGGCACCAAGGTCGAAATCAAGACCACTACCCCAGCACCGAG |
| | | GCCACCCACCCCGGCTCCTACCATCGCCTCCCAGCCTCTGTCCCTGCGTC |
| | | CGGAGGCATGTAGACCCGCAGCTGGTGGGGCCGTGCATACCCGGGGTCTT |
| | | GACTTCGCCTGCGATATCTACATTTGGGCCCCTCTGGCTGGTACTTGCGG |
| | | GGTCCTGCTGCTTTCACTCGTGATCACTCTTTACTGTAAGCGCGGTCGGA |
| | | AGAAGCTGCTGTACATCTTTAAGCAACCCTTCATGAGGCCTGTGCAGACT |
| | | ACTCAAGAGGAGGACGGCTGTTCATGCCGGTTCCCAGAGGAGGAGGAAGG |
| | | CGGCTGCGAACTGCGCGTGAAATTCAGCCGCAGCGCAGATGCTCCAGCCT |
| | | ACAAGCAGGGGCAGAACCAGCTCTACAACGAACTCAATCTTGGTCGGAGA |
| | | GAGGAGTACGACGTGCTGGACAAGCGGAGAGGACGGGACCCAGAAATGGG |
| | | CGGGAAGCCGCGCAGAAAGAATCCCCAAGAGGGCCTGTACAACGAGCTCC |
| | | AAAAGGATAAGATGGCAGAAGCCTATAGCGAGATTGGTATGAAAGGGGAA |
| | | CGCAGAAGAGGCAAAGGCCACGACGGACTGTACCAGGGACTCAGCACCGC |
| | | CACCAAGGACACCTATGACGCTCTTCACATGCAGGCCCTGCCGCCTCGG |

TABLE 31
Amino Acid and Nucleic Acid Sequences of exemplary anti-
BCMA scFv domains and BCMA CAR molecules . The amino
acid sequences variable heavy chain and variable light
chain sequences for each scFv is also provided.

| Name/Description | SEQ ID NO: |
|---|---|
| 139103 | |
| 139103- aa ScFv domain | 586 |
| 139103- nt ScFv domain | 587 |
| 139103- aa VH | 588 |
| 139103- aa VL | 589 |
| 139103- aa Full CAR | 590 |
| 139103- nt Full CAR | 591 |
| 139105 | |
| 139105- aa ScFv domain | 592 |
| 139105- nt ScFv domain | 593 |
| 139105- aa VH | 594 |
| 139105- aa VL | 595 |
| 139105- aa Full CAR | 596 |
| 139105- nt Full CAR | 597 |
| 139111 | |
| 139111- aa ScFv domain | 598 |
| 139111- nt ScFv domain | 599 |
| 139111- aa VH | 600 |
| 139111- aa VL | 601 |
| 139111- aa Full CAR | 602 |
| 139111- nt Full CAR | 603 |
| 139100 | |
| 139100- aa ScFv domain | 604 |
| 139100- nt ScFv domain | 605 |
| 139100- aa VH | 606 |
| 139100- aa VL | 607 |
| 139100- aa Full CAR | 608 |
| 139100- nt Full CAR | 609 |
| 139101 | |
| 139101- aa ScFv domain | 610 |
| 139101- nt ScFv domain | 611 |
| 139101- aa VH | 612 |
| 139101- aa VL | 613 |
| 139101- aa Full CAR | 614 |
| 139101- nt Full CAR | 615 |
| 139102 | |
| 139102- aa ScFv domain | 616 |
| 139102- nt ScFv domain | 617 |
| 139102- aa VH | 618 |
| 139102- aa VL | 619 |
| 139102- aa Full CAR | 620 |
| 139102- nt Full CAR | 621 |
| 139104 | |
| 139104- aa ScFv domain | 622 |
| 139104- nt ScFv domain | 623 |
| 139104- aa VH | 624 |
| 139104- aa VL | 625 |
| 139104- aa Full CAR | 626 |
| 139104- nt Full CAR | 627 |
| 139106 | |
| 139106- aa ScFv domain | 628 |
| 139106- nt ScFv domain | 629 |
| 139106- aa VH | 630 |
| 139106- aa VL | 631 |
| 139106- aa Full CAR | 632 |
| 139106- nt Full CAR | 633 |
| 139107 | |
| 139107- aa ScFv domain | 634 |
| 139107- nt ScFv domain | 635 |
| 139107- aa VH | 636 |
| 139107- aa VL | 637 |
| 139107- aa Full CAR | 638 |
| 139107- nt Full CAR | 639 |
| 139108 | |
| 139108- aa ScFv domain | 640 |
| 139108- nt ScFv domain | 641 |
| 139108- aa VH | 642 |
| 139108- aa VL | 643 |
| 139108- aa Full CAR | 644 |
| 139108- nt Full CAR | 645 |
| 139110 | |
| 139110- aa ScFv domain | 646 |
| 139110- nt ScFv domain | 647 |
| 139110- aa VH | 648 |
| 139110- aa VL | 649 |
| 139110- aa Full CAR | 650 |
| 139110- nt Full CAR | 651 |
| 139112 | |
| 139112- aa ScFv domain | 652 |
| 139112- nt ScFv domain | 653 |
| 139112- aa VH | 654 |
| 139112- aa VL | 655 |
| 139112- aa Full CAR | 656 |
| 139112- nt Full CAR | 657 |
| 139113 | |
| 139113- aa ScFv domain | 658 |
| 139113- nt ScFv domain | 659 |
| 139113- aa VH | 630 |
| 139113- aa VL | 660 |
| 139113- aa Full CAR | 661 |
| 139113- nt Full CAR | 662 |
| 139114 | |
| 139114- aa ScFv domain | 663 |
| 139114- nt ScFv domain | 664 |
| 139114- aa VH | 582 |
| 139114- aa VL | 665 |
| 139114- aa Full CAR | 666 |
| 139114- nt Full CAR | 667 |
| 149362 | |
| 149362-aa ScFv domain | 668 |
| 149362-nt ScFv domain | 669 |
| 149362-aa VH | 670 |
| 149362-aa VL | 671 |
| 149362-aa Full CAR | 672 |
| 149362-nt Full CAR | 673 |
| 149363 | |
| 149363-aa ScFv domain | 674 |
| 149363-nt ScFv domain | 675 |
| 149363-aa VH | 676 |
| 149363-aa VL | 677 |
| 149363-aa Full CAR | 678 |
| 149363-nt Full CAR | 679 |
| 149364 | |
| 149364-aa ScFv domain | 680 |
| 149364-nt ScFv domain | 681 |
| 149364-aa VH | 682 |
| 149364-aa VL | 683 |
| 149364-aa Full CAR | 684 |
| 149364-nt Full CAR | 685 |
| 149365 | |
| 149365-aa ScFv domain | 686 |
| 149365-nt ScFv domain | 687 |
| 149365-aa VH | 688 |
| 149365-aa VL | 689 |
| 149365-aa Full CAR | 690 |
| 149365-nt Full CAR | 691 |
| 149366 | |
| 149366-aa ScFv domain | 692 |
| 149366-nt ScFv domain | 693 |
| 149366-aa VH | 694 |
| 149366-aa VL | 695 |
| 149366-aa Full CAR | 696 |
| 149366-nt Full CAR | 697 |
| 149367 | |
| 149367-aa ScFv domain | 698 |
| 149367-nt ScFv domain | 699 |
| 149367-aa VH | 700 |
| 149367-aa VL | 701 |
| 149367-aa Full CAR | 702 |
| 149367-nt Full CAR | 703 |
| 149368 | |
| 149368-aa ScFv domain | 704 |
| 149368-nt ScFv domain | 705 |
| 149368-aa VH | 706 |
| 149368-aa VL | 707 |
| 149368-aa Full CAR | 708 |
| 149368-nt Full CAR | 709 |
| 149369 | |
| 149369-aa ScFv domain | 710 |
| 149369-nt ScFv domain | 711 |
| 149369-aa VH | 712 |
| 149369-aa VL | 713 |
| 149369-aa Full CAR | 714 |
| 149369-nt Full CAR | 715 |
| BCMA_EBB -C1978 -A4 | |
| BCMA_EBB-C1978-A4 - aa ScFv domain | 716 |
| BCMA_EBB-C1978-A4 - nt ScFv domain | 717 |
| BCMA_EBB-C1978-A4 - aa VH | 718 |
| BCMA_EBB-C1978-A4 - aa VL | 719 |
| BCMA_EBB-C1978-A4 - aa Full CART | 720 |
| BCMA_EBB-C1978-A4 - nt Full CART | 721 |
| BCMA_EBB-C1978-G1 | |
| BCMA_EBB-C1978-G1 - aa ScFv domain | 722 |
| BCMA_EBB-C1978-G1 - nt ScFv domain | 723 |
| BCMA_EBB-C1978-G1 - aa VH | 724 |
| BCMA_EBB-C1978-G1 - aa VL | 725 |
| BCMA_EBB-C1978-G1 - aa Full CART | 726 |
| BCMA_EBB-C1978-G1 - nt Full CART | 727 |
| BCMA_EBB-C1979-C1 | |
| BCMA_EBB-C1979-C1 - aa ScFv domain | 728 |
| BCMA_EBB-C1979-C1 - nt ScFv domain | 729 |
| BCMA_EBB-C1979-C1 - aa VH | 730 |
| BCMA_EBB-C1979-C1 - aa VL | 731 |
| BCMA_EBB-C1979-C1 - aa Full CART | 732 |
| BCMA_EBB-C1979-C1 - nt Full CART | 733 |
| BCMA_EBB-C1978-C7 | |
| BCMA_EBB-C1978-C7 - aa ScFv domain | 734 |
| BCMA_EBB-C1978-C7 - nt ScFv domain | 735 |
| BCMA_EBB-C1978-C7 - aa VH | 736 |
| BCMA_EBB-C1978-C7 - aa VL | 737 |
| BCMA_EBB-C1978-C7 - aa Full CART | 738 |
| BCMA_EBB-C1978-C7 - nt Full CART | 739 |
| BCMA_EBB-C1978-D10 | |
| BCMA_EBB-C1978-D10 - aa ScFv domain | 740 |
| BCMA_EBB-C1978-D10- nt ScFv domain | 741 |
| BCMA_EBB-C1978-D10 - aa VH | 742 |
| BCMA_EBB-C1978-D10- aa VL | 743 |
| BCMA_EBB-C1978-D10 - aa Full CART | 744 |
| BCMA_EBB-C1978-D10 - nt Full CART | 745 |
| BCMA_EBB-C1979-C12 | |
| BCMA_EBB-C1979-C12- aa ScFv domain | 746 |
| BCMA_EBB-C1979-C12 - nt ScFv domain | 747 |
| BCMA_EBB-C1979-C12 - aa VH | 748 |
| BCMA_EBB-C1979-C12 - aa VL | 749 |
| BCMA_EBB-C1979-C12 - aa Full CART | 750 |
| BCMA_EBB-C1979-C12 - nt Full CART | 751 |
| BCMA_EBB-C1980-G4 | |
| BCMA_EBB-C1980-G4- aa ScFv domain | 752 |
| BCMA_EBB-C1980-G4- nt ScFv domain | 753 |
| BCMA_EBB-C1980-G4- aa VH | 754 |
| BCMA_EBB-C1980-G4- aa VL | 755 |
| BCMA_EBB-C1980-G4- aa Full CART | 756 |
| BCMA_EBB-C1980-G4- nt Full CART | 757 |
| BCMA_EBB-C1980-D2 | |
| BCMA_EBB-C1980-D2- aa ScFv domain | 758 |
| BCMA_EBB-C1980-D2- nt ScFv domain | 759 |
| BCMA_EBB-C1980-D2- aa VH | 760 |
| BCMA_EBB-C1980-D2- aa VL | 761 |
| BCMA_EBB-C1980-D2- aa Full CART | 762 |
| BCMA_EBB-C1980-D2- nt Full CART | 763 |
| BCMA_EBB-C1978-A10 | |
| BCMA_EBB-C1978-A10- aa ScFv domain | 764 |
| BCMA_EBB-C1978-A10- nt ScFv domain | 765 |
| BCMA_EBB-C1978-A10- aa VH | 766 |
| BCMA_EBB-C1978-A10- aa VL | 767 |
| BCMA_EBB-C1978-A10- aa Full CART | 768 |
| BCMA_EBB-C1978-A10- nt Full CART | 769 |
| BCMA_EBB-C1978-D4 | |
| BCMA_EBB-C1978-D4- aa ScFv domain | 770 |
| BCMA_EBB-C1978-D4- nt ScFv domain | 771 |
| BCMA_EBB-C1978-D4- aa VH | 772 |
| BCMA_EBB-C1978-D4- aa VL | 773 |
| BCMA_EBB-C1978-D4- aa Full CART | 774 |
| BCMA_EBB-C1978-D4- nt Full CART | 775 |
| BCMA_EBB-C1980-A2 | |
| BCMA_EBB-C1980-A2- aa ScFv domain | 776 |
| BCMA_EBB-C1980-A2- nt ScFv domain | 777 |
| BCMA_EBB-C1980-A2- aa VH | 778 |
| BCMA_EBB-C1980-A2- aa VL | 779 |
| BCMA_EBB-C1980-A2- aa Full CART | 780 |
| BCMA_EBB-C1980-A2- nt Full CART | 781 |
| BCMA_EBB-C1981-C3 | |
| BCMA_EBB-C1981-C3- aa ScFv domain | 782 |
| BCMA_EBB-C1981-C3- nt ScFv domain | 783 |
| BCMA_EBB-C1981-C3- aa VH | 784 |
| BCMA_EBB-C1981-C3- aa VL | 785 |
| BCMA_EBB-C1981-C3- aa Full CART | 786 |
| BCMA_EBB-C1981-C3- nt Full CART | 787 |
| BCMA_EBB-C1978-G4 | |
| BCMA_EBB-C1978-G4- aa ScFv domain | 788 |
| BCMA_EBB-C1978-G4- nt ScFv domain | 789 |
| BCMA_EBB-C1978-G4- aa VH | 790 |
| BCMA_EBB-C1978-G4- aa VL | 791 |
| BCMA_EBB-C1978-G4- aa Full CART | 792 |
| BCMA_EBB-C1978-G4- nt Full CART | 793 |

TABLE 18
Amino acid sequences of exemplary BCMA binding domains

| SEQ ID NO | Description |
|---|---|
| ER26 | |
| SEQ ID NO: 794 | J6M0 VH |
| SEQ ID NO: 795 | J6M0 VL |
| SEQ ID NO: 796 | Anti-BCMA heavy chain of ER26 |
| SEQ ID NO: 797 | Anti-BCMA light chain of ER26 |
| BQ76 | |
| SEQ ID NO: 798 | 17A5 VH |
| SEQ ID NO: 799 | 17A5 VL |
| SEQ ID NO: 800 | Anti-BCMA heavy chain of BQ76 |
| SEQ ID NO: 801 | Anti-BCMA light chain of BQ76 |
| BU76 | |
| SEQ ID NO: 802 | C11D5 VH |
| SEQ ID NO: 803 | C11D5 VL |
| SEQ ID NO: 804 | Anti-BCMA heavy chain of BU76 |
| SEQ ID NO: 805 | Anti-BCMA light chain of BU76 |
| EE11 | |
| SEQ ID NO: 806 | 83A10 VH |
| SEQ ID NO: 807 | 83A10 VL |
| SEQ ID NO: 808 | Anti-BCMA scFv-Fc of EE11 |
| EM90 | |
| SEQ ID NO: 809 | Comment light chain of EM90 |
| SEQ ID NO: 810 | Anti-BCMA heavy chain of EM90 |

[1066] Additional exemplary BCMA-targeting sequences that can be used in the anti-BCMA CAR constructs are disclosed in WO 2017/021450, WO 2017/011804, WO 2017/025038, WO 2016/090327, WO 2016/130598, WO 2016/210293, WO 2016/090320, WO 2016/014789, WO 2016/094304, WO 2016/154055, WO 2015/166073, WO 2015/188119, WO 2015/158671, U.S. Pat. Nos. 9,243,058, 8,920,776, 9,273,141, 7,083,785, 9,034,324, US 2007/0049735, US 2015/0284467, US 2015/0051266, US 2015/0344844, US 2016/0131655, US 2016/0297884, US 2016/0297885, US 2017/0051308, US 2017/0051252, US 2017/0051252, WO 2016/020332, WO 2016/087531, WO 2016/079177, WO 2015/172800, WO 2017/008169, U.S. Pat. No. 9,340,621, US 2013/0273055, US 2016/0176973, US 2015/0368351, US 2017/0051068, US 2016/0368988, US 2015/0232557, herein incorporated by reference in their entireties.

[1067] In embodiments, additional exemplary BCMA CAR constructs are generated using the VH and VL sequences from PCT Publication WO2012/0163805 (the contents of which are hereby incorporated by reference in its entirety). Exemplary BCMA CAR constructs and their corresponding DNA sequences are shown in Table 17.

### CD22 CAR

[1068] In other embodiments, the CAR-expressing cells can specifically bind to CD22, e.g., can include a CAR molecule, or an antigen binding domain (e.g., a humanized antigen binding domain) according to WO2016/164731, incorporated herein by reference.

[1069] In embodiments, the CAR molecule comprises an antigen binding domain that binds specifically to CD22 (CD22 CAR). In one embodiment, the antigen binding domain targets human CD22. In one embodiment, the antigen binding domain includes a single chain Fv sequence as described herein.

[1070] The sequences of human CD22 CAR are provided below. In some embodiments, a human CD22 CAR is CAR22-65.

Human CD22 CAR scFv sequence (VH-(G4S)3-VL)
(SEQ ID NO: 811)
EVQLQQSGPGLVKPSQTLSLTCAISGDSMLSNSDTWNWIRQSPSRGLEWL
GRTYHRSTWYDDYASSVRGRVSINVDTSKNQYSLQLNAVTPEDTGVYYCA
RVRLQDGNSWSDAFDVWGQGTMVTVSSGGGGSGGGGSGGGGSQSALTQPA
SASGSPGQSVTISCTGTSSDVGGYNYVSWYQQHPGKAPKLMIYDVSNRPS
GVSNRFSGSKSGNTASLTISGLQAEDEADYYCSSYTSSSTLYVFGTGTQL
TVL
Human CD22 CAR heavy chain variable region
(SEQ ID NO: 812)
EVQLQQSGPGLVKPSQTLSLTCAISGDSMLSNSDTWNWIRQSPSRGLEWL
GRTYHRSTWYDDYASSVRGRVSINVDTSKNQYSLQLNAVTPEDTGVYYCA
RVRLQDGNSWSDAFDVWGQGTMVTVSS
Human CD22 CAR light chain variable region
(SEQ ID NO: 813)
QSALTQPASASGSPGQSVTISCTGTSSDVGGYNYVSWYQQHPGKAPKLMI
YDVSNRPSGVSNRFSGSKSGNTASLTISGLQAEDEADYYCSSYTSSSTLY
VFGTGTQLTVL

TABLE 19
Heavy Chain Variable Domain CDRs of CD22 CAR (CAR22-65)

| | | SEQ ID | | SEQ ID | | SEQ ID |
|---|---|---|---|---|---|---|
| Candidate | HCDR1 | NO: | HCDR2 | NO: | HCDR3 | NO: |
| CAR22-65 | GDSMLS | 814 | RTYHRSTWYDDYAS | 816 | VRLQDGNSWSD | 817 |
| Combined | NSDTW | | SVRG | | AFDV | |
| | N | | | | | |
| CAR22-65 | SNSDT | 815 | RTYHRSTWYDDYAS | 816 | VRLQDGNSWSD | 817 |
| Kabat | WN | | SVRG | | AFDV | |

TABLE 20
Light Chain Variable Domain CDRs of CD22 CAR (CAR22-65).
The LC CDR sequences in this table have the same sequence
under the Kabat or combined definitions.

| | | SEQ ID | | SEQ ID | | SEQ ID |
|---|---|---|---|---|---|---|
| Candidate | LCDR1 | NO: | LCDR2 | NO: | LCDR3 | NO: |
| CAR22-65 | TGTSSDVGGYNYVS | 818 | DVSNRPS | 819 | SSYTSSSTLYV | 820 |
| Combined | | | | | | |

[1071] In some embodiments, the antigen binding domain comprises a HC CDR1, a HC CDR2, and a HC CDR3 of any heavy chain binding domain amino acid sequences listed in Table 19. In embodiments, the antigen binding domain further comprises a LC CDR1, a LC CDR2, and a LC CDR3. In embodiments, the antigen binding domain comprises a LC CDR1, a LC CDR2, and a LC CDR3 amino acid sequences listed in Table 20.

[1072] In some embodiments, the antigen binding domain comprises one, two or all of LC CDR1, LC CDR2, and LC CDR3 of any light chain binding domain amino acid sequences listed in Table 20, and one, two or all of HC CDR1, HC CDR2, and HC CDR3 of any heavy chain binding domain amino acid sequences listed in Table 19.

[1073] In some embodiments, the CDRs are defined according to the Kabat numbering scheme, the Chothia numbering scheme, or a combination thereof.

[1074] Additional anti-CD20 scFv sequences are provided below:

Human CD22 CAR scFv sequence (VH-(G4S)-VL)
(SEQ ID NO: 1447)
EVQLQQSGPGLVKPSQTLSLTCAISGDSMLSNSDTWNWIRQSPSRGLEWL
GRTYHRSTWYDDYASSVRGRVSINVDTSKNQYSLQLNAVTPEDTGVYYCA
RVRLQDGNSWSDAFDVWGQGTMVTVSSGGGGSQSALTQPASASGSPGQSV
TISCTGTSSDVGGYNYVSWYQQHPGKAPKLMIYDVSNRPSGVSNRFSGSK
SGNTASLTISGLQAEDEADYYCSSYTSSSTLYVFGTGTQLTVL
Human CD22 CAR scFv sequence (VL-(G4S)3-VH)
(SEQ ID NO: 1448)
QSALTQPASASGSPGQSVTISCTGTSSDVGGYNYVSWYQQHPGKAPKLMI
YDVSNRPSGVSNRFSGSKSGNTASLTISGLQAEDEADYYCSSYTSSSTLY
VFGTGTQLTVLGGGGSGGGGSGGGGSEVQLQQSGPGLVKPSQTLSLTCAI
SGDSMLSNSDTWNWIRQSPSRGLEWLGRTYHRSTWYDDYASSVRGRVSIN
VDTSKNQYSLQLNAVTPEDTGVYYCARVRLQDGNSWSDAFDVWGQGTMVT
VSS
Human CD22 CAR scFv sequence (VL-(G4S)-VH)
(SEQ ID NO: 1449)
QSALTQPASASGSPGQSVTISCTGTSSDVGGYNYVSWYQQHPGKAPKLMI
YDVSNRPSGVSNRFSGSKSGNTASLTISGLQAEDEADYYCSSYTSSSTLY
VFGTGTQLTVLGGGGSEVQLQQSGPGLVKPSQTLSLTCAISGDSMLSNSD
TWNWIRQSPSRGLEWLGRTYHRSTWYDDYASSVRGRVSINVDTSKNQYSL
QLNAVTPEDTGVYYCARVRLQDGNSWSDAFDVWGQGTMVTVSS

[1075] The order in which the VL and VH domains appear in the scFv can be varied (i.e., VL-VH, or VH-VL orientation), and where any of one, two, three or four copies of the “G4S” (SEQ ID NO: 168) subunit, in which each subunit comprises the sequence GGGGS (SEQ ID NO: 168) (e.g., (G4S)₃ (SEQ ID NO: 142) or (G4S)₄(SEQ ID NO: 141)), can connect the variable domains to create the entirety of the scFv domain. Alternatively, the CAR construct can include, for example, a linker including the sequence GSTSGSGKPGSGEGSTKG (SEQ ID NO: 821). Alternatively, the CAR construct can include, for example, a linker including the sequence LAEAAAK (SEQ ID NO: 822). In an embodiment, the CAR construct does not include a linker between the VL and VH domains.

[1076] These clones all contained a Q/K residue change in the signal domain of the co-stimulatory domain derived from CD3zeta chain.

[1077] In some embodiments, the CAR molecule described herein is a bispecific CAR molecule. In one embodiment, the bispecific CAR molecule comprises a first binding specificity to CD19, e.g., a VL1-VH1 binding specificity to CD19, and a second binding specificity to CD22, e.g., a VL2-VH2 or VH2-VL1 binding specificity to CD22. In one embodiment, the first and second binding specificity are in a contiguous polypeptide chain, e.g., a single chain. In some embodiments, the first and second binding specificities, optionally, comprise a linker as described herein. In some embodiments, the bispecific CAR molecule comprises a CD19-binding domain comprising an amino acid sequence disclosed in Table 5 and Table 30.

[1078] In one embodiment, the bispecific CAR molecule comprises a first binding specificity to CD22, e.g., a VL2-VH2 or VH2-VL1 binding specificity to CD22, and a second binding specificity to CD19, e.g., a VL1-VH1 binding specificity to CD19. In one embodiment, the first and second binding specificity are in a contiguous polypeptide chain, e.g., a single chain. In some embodiments, the first and second binding specificities, optionally, comprise a linker as described herein.

[1079] In some embodiments, the linker is a (Gly4-Ser)ₙ linker, wherein n is 1, 2, 3, 4, 5, or 6. In some embodiments, the linker is (Gly4-Ser)ₙ, wherein n=1 (SEQ ID NO: 168), e.g., the linker has the amino acid sequence Gly4-Ser (SEQ ID NO: 168). In some embodiments, the linker is (Gly4-Ser)ₙ, wherein n=3 (SEQ ID NO: 142). In some embodiments, the linker is (Gly4-Ser)ₙ, wherein n=4 (SEQ ID NO: 141). In some embodiments, the linker comprises, e.g., consists of, the amino acid sequence: LAEAAAK (SEQ ID NO: 822).

### CD20 CAR

[1080] In some embodiments, the CAR-expressing cell described herein is a CD20 CAR-expressing cell (e.g., a cell expressing a CAR that binds to human CD20). In some embodiments, the CD20 CAR-expressing cell includes an antigen binding domain according to WO2016/164731 and PCT/US2017/055627, incorporated herein by reference. Exemplary CD20-binding sequences or CD20 CAR sequences are disclosed in, e.g., Tables 1-5 of PCT/US2017/055627, incorporated herein by reference. In some embodiments, the CD20-binding sequences or CD20 CAR comprises a CDR, variable region, scFv, or full-length sequence of a CD20 CAR disclosed in PCT/US2017/055627 or WO2016/164731, incorporated herein by reference. Exemplary anti-CD20 CAR sequences may comprise a CDR, a variable region, an scFv, or a full-length CAR sequence of a sequence disclosed in Table 32 (or a sequence at least about 85%, 90%, 95%, 99% or more identical thereto, and/or having one, two, three or more substitutions, insertions, deletions, or modifications).

TABLE 32
CD20 CAR sequences.

| | |
|---|---|
| SEQ ID NO | Ab region |

CD20-C3H2

| | |
|---|---|
| SEQ ID NO: 838 (Rabat) | HCDR1 |
| SEQ ID NO: 839 (Rabat) | HCDR2 |
| SEQ ID NO: 840 (Rabat) | HCDR3 |
| SEQ ID NO: 841 (Chothia) | HCDR1 |
| SEQ ID NO: 842 (Chothia) | HCDR2 |
| SEQ ID NO: 843 (Chothia) | HCDR3 |
| SEQ ID NO: 844 (IMGT) | HCDR1 |
| SEQ ID NO: 845 (IMGT) | HCDR2 |
| SEQ ID NO: 846 (IMGT) | HCDR3 |
| SEQ ID NO: 847 (Combined Chothia and Rabat) | HCDR1 |
| SEQ ID NO: 848 (Combined Chothia and Rabat) | HCDR2 |
| SEQ ID NO: 849 (Combined Chothia and Rabat) | HCDR3 |
| SEQ ID NO: 850 | VH |
| SEQ ID NO: 851 | DNA VH |
| SEQ ID NO: 852 (Rabat) | LCDR1 |
| SEQ ID NO: 853 (Rabat) | LCDR2 |
| SEQ ID NO: 854 (Rabat) | LCDR3 |
| SEQ ID NO: 855 (Chothia) | LCDR1 |
| SEQ ID NO: 856 (Chothia) | LCDR2 |
| SEQ ID NO: 857 (Chothia) | LCDR3 |
| SEQ ID NO: 858 (IMGT) | LCDR1 |
| SEQ ID NO: 859 (IMGT) | LCDR2 |
| SEQ ID NO: 860 (IMGT) | LCDR3 |
| SEQ ID NO: 861 (Combined Chothia and Rabat) | LCDR1 |
| SEQ ID NO: 862 (Combined Chothia and Rabat) | LCDR2 |
| SEQ ID NO: 863 (Combined Chothia and Rabat) | LCDR3 |
| SEQ ID NO: 864 | VL |
| SEQ ID NO: 865 | DNA VL |
| SEQ ID NO: 866 | Linker |
| SEQ ID NO: 867 | scFv (VH-linker-VL) |
| SEQ ID NO: 868 | DNA scFv (VH-linker-VL) |
| SEQ ID NO: 869 | Full CAR amino acid sequence |
| SEQ ID NO: 870 | Full CAR nucleic acid sequence |

CD20-C5H1

| | |
|---|---|
| SEQ ID NO: 871 (Rabat) | HCDR1 |
| SEQ ID NO: 872 (Rabat) | HCDR2 |
| SEQ ID NO: 873 (Rabat) | HCDR3 |
| SEQ ID NO: 874 (Chothia) | HCDR1 |
| SEQ ID NO: 875 (Chothia) | HCDR2 |
| SEQ ID NO: 876 (Chothia) | HCDR3 |
| SEQ ID NO: 877 (IMGT) | HCDR1 |
| SEQ ID NO: 878 (IMGT) | HCDR2 |
| SEQ ID NO: 879 (IMGT) | HCDR3 |
| SEQ ID NO: 880 (Combined Chothia and Rabat) | HCDR1 |
| SEQ ID NO: 881 (Combined Chothia and Rabat) | HCDR2 |
| SEQ ID NO: 882 (Combined Chothia and Kabat) | HCDR3 |
| SEQ ID NO: 883 | VH |
| SEQ ID NO: 884 | DNA VH |
| SEQ ID NO: 885 (Kabat) | LCDR1 |
| SEQ ID NO: 886 (Kabat) | LCDR2 |
| SEQ ID NO: 887 (Kabat) | LCDR3 |
| SEQ ID NO: 888 (Chothia) | LCDR1 |
| SEQ ID NO: 889 (Chothia) | LCDR2 |
| SEQ ID NO: 890 (Chothia) | LCDR3 |
| SEQ ID NO: 891 (IMGT) | LCDR1 |
| SEQ ID NO: 892 (IMGT) | LCDR2 |
| SEQ ID NO: 893 (IMGT) | LCDR3 |
| SEQ ID NO: 894 (Combined Chothia and Kabat) | LCDR1 |
| SEQ ID NO: 895 (Combined Chothia and Kabat) | LCDR2 |
| SEQ ID NO: 896 (Combined Chothia and Kabat) | LCDR3 |
| SEQ ID NO: 897 | VL |
| SEQ ID NO: 898 | DNA VL |
| SEQ ID NO: 899 | Linker |
| SEQ ID NO: 900 | scFv (VH-linker-VL) |
| SEQ ID NO: 901 | DNA scFv (VH-linker-VL) |
| SEQ ID NO: 902 | Full CAR amino acid sequence |
| SEQ ID NO: 903 | Full CAR nucleic acid sequence |

CD20-C2H1

| | |
|---|---|
| SEQ ID NO: 904 (Kabat) | HCDR1 |
| SEQ ID NO: 905 (Kabat) | HCDR2 |
| SEQ ID NO: 906 (Kabat) | HCDR3 |
| SEQ ID NO: 907 (Chothia) | HCDR1 |
| SEQ ID NO: 908 (Chothia) | HCDR2 |
| SEQ ID NO: 909 (Chothia) | HCDR3 |
| SEQ ID NO: 910 (IMGT) | HCDR1 |
| SEQ ID NO: 911 (IMGT) | HCDR2 |
| SEQ ID NO: 912 (IMGT) | HCDR3 |
| SEQ ID NO: 913 (Combined Chothia and Kabat) | HCDR1 |
| SEQ ID NO: 914 (Combined Chothia and Kabat) | HCDR2 |
| SEQ ID NO: 915 (Combined Chothia and Kabat) | HCDR3 |
| SEQ ID NO: 916 | VH |
| SEQ ID NO: 917 | DNA VH |
| SEQ ID NO: 918 (Kabat) | LCDR1 |
| SEQ ID NO: 919 (Kabat) | LCDR2 |
| SEQ ID NO: 920 (Kabat) | LCDR3 |
| SEQ ID NO: 921 (Chothia) | LCDR1 |
| SEQ ID NO: 922 (Chothia) | LCDR2 |
| SEQ ID NO: 923 (Chothia) | LCDR3 |
| SEQ ID NO: 924 (IMGT) | LCDR1 |
| SEQ ID NO: 925 (IMGT) | LCDR2 |
| SEQ ID NO: 926 (IMGT) | LCDR3 |
| SEQ ID NO: 927 (Combined Chothia and Kabat) | LCDR1 |
| SEQ ID NO: 928 (Combined Chothia and Kabat) | LCDR2 |
| SEQ ID NO: 929 (Combined Chothia and Kabat) | LCDR3 |
| SEQ ID NO: 930 | VL |
| SEQ ID NO: 931 | DNA VL |
| SEQ ID NO: 932 | Linker |
| SEQ ID NO: 933 | scFv (VH-linker-VL) |
| SEQ ID NO: 934 | DNA scFv (VH-linker-VL) |
| SEQ ID NO: 935 | Full CAR amino acid sequence |
| SEQ ID NO: 936 | Full CAR nucleic acid sequence |

CD20-C2H2

| | |
|---|---|
| SEQ ID NO: 937 (Rabat) | HCDR1 |
| SEQ ID NO: 938 (Rabat) | HCDR2 |
| SEQ ID NO: 939 (Rabat) | HCDR3 |
| SEQ ID NO: 940 (Chothia) | HCDR1 |
| SEQ ID NO: 941 (Chothia) | HCDR2 |
| SEQ ID NO: 942 (Chothia) | HCDR3 |
| SEQ ID NO: 943 (IMGT) | HCDR1 |
| SEQ ID NO: 944 (IMGT) | HCDR2 |
| SEQ ID NO: 945 (IMGT) | HCDR3 |
| SEQ ID NO: 946 (Combined Chothia and Rabat) | HCDR1 |
| SEQ ID NO: 947 (Combined Chothia and Rabat) | HCDR2 |
| SEQ ID NO: 948 (Combined Chothia and Rabat) | HCDR3 |
| SEQ ID NO: 949 | VH |
| SEQ ID NO: 950 | DNA VH |
| SEQ ID NO: 951 (Rabat) | LCDR1 |
| SEQ ID NO: 952 (Rabat) | LCDR2 |
| SEQ ID NO: 953 (Rabat) | LCDR3 |
| SEQ ID NO: 954 (Chothia) | LCDR1 |
| SEQ ID NO: 955 (Chothia) | LCDR2 |
| SEQ ID NO: 956 (Chothia) | LCDR3 |
| SEQ ID NO: 957 (IMGT) | LCDR1 |
| SEQ ID NO: 958 (IMGT) | LCDR2 |
| SEQ ID NO: 959 (IMGT) | LCDR3 |
| SEQ ID NO: 960 (Combined Chothia and Rabat) | LCDR1 |
| SEQ ID NO: 961 (Combined Chothia and Rabat) | LCDR2 |
| SEQ ID NO: 962 (Combined Chothia and Rabat) | LCDR3 |
| SEQ ID NO: 963 | VL |
| SEQ ID NO: 964 | DNA VL |
| SEQ ID NO: 965 | Linker |
| SEQ ID NO: 966 | scFv (VH-linker-VL) |
| SEQ ID NO: 967 | DNA scFv (VH-linker-VL) |
| SEQ ID NO: 968 | Full CAR amino acid sequence |
| SEQ ID NO: 969 | Full CAR nucleic acid sequence |

CD20-C2H3

| | |
|---|---|
| SEQ ID NO: 970 (Rabat) | HCDR1 |
| SEQ ID NO: 971 (Rabat) | HCDR2 |
| SEQ ID NO: 972 (Rabat) | HCDR3 |
| SEQ ID NO: 973 (Chothia) | HCDR1 |
| SEQ ID NO: 974 (Chothia) | HCDR2 |
| SEQ ID NO: 975 (Chothia) | HCDR3 |
| SEQ ID NO: 976 (IMGT) | HCDR1 |
| SEQ ID NO: 977 (IMGT) | HCDR2 |
| SEQ ID NO: 978 (IMGT) | HCDR3 |
| SEQ ID NO: 979 (Combined Chothia and Rabat) | HCDR1 |
| SEQ ID NO: 980 (Combined Chothia and Rabat) | HCDR2 |
| SEQ ID NO: 981 (Combined Chothia and Rabat) | HCDR3 |
| SEQ ID NO: 982 | VH |
| SEQ ID NO: 983 | DNA VH |
| SEQ ID NO: 984 (Rabat) | LCDR1 |
| SEQ ID NO: 985 (Rabat) | LCDR2 |
| SEQ ID NO: 986 (Rabat) | LCDR3 |
| SEQ ID NO: 987 (Chothia) | LCDR1 |
| SEQ ID NO: 988 (Chothia) | LCDR2 |
| SEQ ID NO: 989 (Chothia) | LCDR3 |
| SEQ ID NO: 990 (IMGT) | LCDR1 |
| SEQ ID NO: 991 (IMGT) | LCDR2 |
| SEQ ID NO: 992 (IMGT) | LCDR3 |
| SEQ ID NO: 993 (Combined Chothia and Rabat) | LCDR1 |
| SEQ ID NO: 994 (Combined Chothia and Rabat) | LCDR2 |
| SEQ ID NO: 995 (Combined Chothia and Rabat) | LCDR3 |
| SEQ ID NO: 996 | VL |
| SEQ ID NO: 997 | DNA VL |
| SEQ ID NO: 998 | Linker |
| SEQ ID NO: 999 | scFv (VH-linker-VL) |
| SEQ ID NO: 1000 | DNA scFv (VH-linker-VL) |
| SEQ ID NO: 1001 | Full CAR amino acid sequence |
| SEQ ID NO: 1002 | Full CAR nucleic acid sequence |

CD20-C2H4

| | |
|---|---|
| SEQ ID NO: 1003 (Rabat) | HCDR1 |
| SEQ ID NO: 1004 (Rabat) | HCDR2 |
| SEQ ID NO: 1005 (Rabat) | HCDR3 |
| SEQ ID NO: 1006 (Chothia) | HCDR1 |
| SEQ ID NO: 1007 (Chothia) | HCDR2 |
| SEQ ID NO: 1008 (Chothia) | HCDR3 |
| SEQ ID NO: 1009 (IMGT) | HCDR1 |
| SEQ ID NO: 1010 (IMGT) | HCDR2 |
| SEQ ID NO: 1011 (IMGT) | HCDR3 |
| SEQ ID NO: 1012 (Combined Chothia and Rabat) | HCDR1 |
| SEQ ID NO: 1013 (Combined Chothia and Rabat) | HCDR2 |
| SEQ ID NO: 1014 (Combined Chothia and Rabat) | HCDR3 |
| SEQ ID NO: 1015 | VH |
| SEQ ID NO: 1016 | DNA VH |
| SEQ ID NO: 1017 (Rabat) | LCDR1 |
| SEQ ID NO: 1018 (Rabat) | LCDR2 |
| SEQ ID NO: 1019 (Rabat) | LCDR3 |
| SEQ ID NO: 1020 (Chothia) | LCDR1 |
| SEQ ID NO: 1021 (Chothia) | LCDR2 |
| SEQ ID NO: 1022 (Chothia) | LCDR3 |
| SEQ ID NO: 1023 (IMGT) | LCDR1 |
| SEQ ID NO: 1024 (IMGT) | LCDR2 |
| SEQ ID NO: 1025 (IMGT) | LCDR3 |
| SEQ ID NO: 1026 (Combined Chothia and Kabat) | LCDR1 |
| SEQ ID NO: 1027 (Combined Chothia and Kabat) | LCDR2 |
| SEQ ID NO: 1028 (Combined Chothia and Kabat) | LCDR3 |
| SEQ ID NO: 1029 | VL |
| SEQ ID NO: 1030 | DNA VL |
| SEQ ID NO: 1031 | Linker |
| SEQ ID NO: 1032 | scFv (VH-linker-VL) |
| SEQ ID NO: 1033 | DNA scFv (VH-linker-VL) |
| SEQ ID NO: 1034 | Full CAR amino acid sequence |
| SEQ ID NO: 1035 | Full CAR nucleic acid sequence |

CD20-C3H1

| | |
|---|---|
| SEQ ID NO: 1036 (Kabat) | HCDR1 |
| SEQ ID NO: 1037 (Kabat) | HCDR2 |
| SEQ ID NO: 1038 (Kabat) | HCDR3 |
| SEQ ID NO: 1039 (Chothia) | HCDR1 |
| SEQ ID NO: 1040 (Chothia) | HCDR2 |
| SEQ ID NO: 1041 (Chothia) | HCDR3 |
| SEQ ID NO: 1042 (IMGT) | HCDR1 |
| SEQ ID NO: 1043 (IMGT) | HCDR2 |
| SEQ ID NO: 1044 (IMGT) | HCDR3 |
| SEQ ID NO: 1045 (Combined Chothia and Kabat) | HCDR1 |
| SEQ ID NO: 1046 (Combined Chothia and Kabat) | HCDR2 |
| SEQ ID NO: 1047 (Combined Chothia and Kabat) | HCDR3 |
| SEQ ID NO: 1048 | VH |
| SEQ ID NO: 1049 | DNA VH |
| SEQ ID NO: 1050 (Kabat) | LCDR1 |
| SEQ ID NO: 1051 (Kabat) | LCDR2 |
| SEQ ID NO: 1052 (Kabat) | LCDR3 |
| SEQ ID NO: 1053 (Chothia) | LCDR1 |
| SEQ ID NO: 1054 (Chothia) | LCDR2 |
| SEQ ID NO: 1055 (Chothia) | LCDR3 |
| SEQ ID NO: 1056 (IMGT) | LCDR1 |
| SEQ ID NO: 1057 (IMGT) | LCDR2 |
| SEQ ID NO: 1058 (IMGT) | LCDR3 |
| SEQ ID NO: 1059 (Combined Chothia and Kabat) | LCDR1 |
| SEQ ID NO: 1060 (Combined Chothia and Kabat) | LCDR2 |
| SEQ ID NO: 1061 (Combined Chothia and Kabat) | LCDR3 |
| SEQ ID NO: 1062 | VL |
| SEQ ID NO: 1063 | DNA VL |
| SEQ ID NO: 1064 | Linker |
| SEQ ID NO: 1065 | scFv (VH-linker-VL) |
| SEQ ID NO: 1066 | DNA scFv (VH-linker-VL) |
| SEQ ID NO: 1067 | Full CAR amino acid sequence |
| SEQ ID NO: 1068 | Full CAR nucleic acid sequence |

CD20-C3H3

| | |
|---|---|
| SEQ ID NO: 1069 (Kabat) | HCDR1 |
| SEQ ID NO: 1070 (Kabat) | HCDR2 |
| SEQ ID NO: 1071 (Kabat) | HCDR3 |
| SEQ ID NO: 1072 (Chothia) | HCDR1 |
| SEQ ID NO: 1073 (Chothia) | HCDR2 |
| SEQ ID NO: 1074 (Chothia) | HCDR3 |
| SEQ ID NO: 1075 (IMGT) | HCDR1 |
| SEQ ID NO: 1076 (IMGT) | HCDR2 |
| SEQ ID NO: 1077 (IMGT) | HCDR3 |
| SEQ ID NO: 1078 | VH |
| SEQ ID NO: 1079 | DNA VH |
| SEQ ID NO: 1080 (Kabat) | LCDR1 |
| SEQ ID NO: 1081 (Kabat) | LCDR2 |
| SEQ ID NO: 1082 (Kabat) | LCDR3 |
| SEQ ID NO: 1083 (Chothia) | LCDR1 |
| SEQ ID NO: 1084 (Chothia) | LCDR2 |
| SEQ ID NO: 1085 (Chothia) | LCDR3 |
| SEQ ID NO: 1086 (IMGT) | LCDR1 |
| SEQ ID NO: 1087 (IMGT) | LCDR2 |
| SEQ ID NO: 1088 (IMGT) | LCDR3 |
| SEQ ID NO: 1089 (Combined Chothia and Kabat) | LCDR1 |
| SEQ ID NO: 1090 (Combined Chothia and Kabat) | LCDR2 |
| SEQ ID NO: 1091 (Combined Chothia and Kabat) | LCDR3 |
| SEQ ID NO: 1092 | VL |
| SEQ ID NO: 1093 | DNA VL |
| SEQ ID NO: 1094 | Linker |
| SEQ ID NO: 1095 | scFv (VH-linker-VL) |
| SEQ ID NO: 1096 | DNA scFv (VH-linker-VL) |
| SEQ ID NO: 1097 | Full CAR amino acid sequence |
| SEQ ID NO: 1098 | Full CAR nucleic acid sequence |

CD20-C3H4

| | |
|---|---|
| SEQ ID NO: 1099 (Kabat) | HCDR1 |
| SEQ ID NO: 1100 (Kabat) | HCDR2 |
| SEQ ID NO: 1101 (Kabat) | HCDR3 |
| SEQ ID NO: 1102 (Chothia) | HCDR1 |
| SEQ ID NO: 1103 (Chothia) | HCDR2 |
| SEQ ID NO: 1104 (Chothia) | HCDR3 |
| SEQ ID NO: 1105 (IMGT) | HCDR1 |
| SEQ ID NO: 1106 (IMGT) | HCDR2 |
| SEQ ID NO: 1107 (IMGT) | HCDR3 |
| SEQ ID NO: 1108 (Combined Chothia and Kabat) | HCDR1 |
| SEQ ID NO: 1109 (Combined Chothia and Kabat) | HCDR2 |
| SEQ ID NO: 1110 (Combined Chothia and Kabat) | HCDR3 |
| SEQ ID NO: 1111 | VH |
| SEQ ID NO: 1112 | DNA VH |
| SEQ ID NO: 1113 (Kabat) | LCDR1 |
| SEQ ID NO: 1114 (Kabat) | LCDR2 |
| SEQ ID NO: 1115 (Kabat) | LCDR3 |
| SEQ ID NO: 1116 (Chothia) | LCDR1 |
| SEQ ID NO: 1117 (Chothia) | LCDR2 |
| SEQ ID NO: 1118 (Chothia) | LCDR3 |
| SEQ ID NO: 1119 (IMGT) | LCDR1 |
| SEQ ID NO: 1120 (IMGT) | LCDR2 |
| SEQ ID NO: 1121 (IMGT) | LCDR3 |
| SEQ ID NO: 1122 (Combined Chothia and Rabat) | LCDR1 |
| SEQ ID NO: 1123 (Combined Chothia and Rabat) | LCDR2 |
| SEQ ID NO: 1124 (Combined Chothia and Rabat) | LCDR3 |
| SEQ ID NO: 1125 | VL |
| SEQ ID NO: 1126 | DNA VL |
| SEQ ID NO: 1127 | Linker |
| SEQ ID NO: 1128 | scFv (VH-linker-VL) |
| SEQ ID NO: 1129 | DNA scFv (VH-linker-VL) |
| SEQ ID NO: 1130 | Full CAR amino acid sequence |
| SEQ ID NO: 1131 | Full CAR nucleic acid sequence |

CD20-C5H2

| | |
|---|---|
| SEQ ID NO: 1132 (Rabat) | HCDR1 |
| SEQ ID NO: 1133 (Rabat) | HCDR2 |
| SEQ ID NO: 1134 (Rabat) | HCDR3 |
| SEQ ID NO: 1135 (Chothia) | HCDR1 |
| SEQ ID NO: 1136 (Chothia) | HCDR2 |
| SEQ ID NO: 1137 (Chothia) | HCDR3 |
| SEQ ID NO: 1138 (IMGT) | HCDR1 |
| SEQ ID NO: 1139 (IMGT) | HCDR2 |
| SEQ ID NO: 1140 (IMGT) | HCDR3 |
| SEQ ID NO: 1141 (Combined Chothia and Rabat) | HCDR1 |
| SEQ ID NO: 1142 (Combined Chothia and Rabat) | HCDR2 |
| SEQ ID NO: 1143 (Combined Chothia and Rabat) | HCDR3 |
| SEQ ID NO: 1144 | VH |
| SEQ ID NO: 1145 | DNA VH |
| SEQ ID NO: 1146 (Rabat) | LCDR1 |
| SEQ ID NO: 1147 (Rabat) | LCDR2 |
| SEQ ID NO: 1148 (Rabat) | LCDR3 |
| SEQ ID NO: 1149 (Chothia) | LCDR1 |
| SEQ ID NO: 1150 (Chothia) | LCDR2 |
| SEQ ID NO: 1151 (Chothia) | LCDR3 |
| SEQ ID NO: 1152 (IMGT) | LCDR1 |
| SEQ ID NO: 1153 (IMGT) | LCDR2 |
| SEQ ID NO: 1154 (IMGT) | LCDR3 |
| SEQ ID NO: 1155 (Combined Chothia and Rabat) | LCDR1 |
| SEQ ID NO: 1156 (Combined Chothia and Rabat) | LCDR2 |
| SEQ ID NO: 1157 (Combined Chothia and Rabat) | LCDR3 |
| SEQ ID NO: 1158 | VL |
| SEQ ID NO: 1159 | DNA VL |
| SEQ ID NO: 1160 | Linker |
| SEQ ID NO: 1161 | scFv (VH-linker-VL) |
| SEQ ID NO: 1162 | DNA scFv (VH-linker-VL) |
| SEQ ID NO: 1163 | Full CAR amino acid sequence |
| SEQ ID NO: 1164 | Full CAR nucleic acid sequence |

CD20-C5H3

| | |
|---|---|
| SEQ ID NO: 1165 (Rabat) | HCDR1 |
| SEQ ID NO: 1166 (Rabat) | HCDR2 |
| SEQ ID NO: 1167 (Rabat) | HCDR3 |
| SEQ ID NO: 1168 (Chothia) | HCDR1 |
| SEQ ID NO: 1169 (Chothia) | HCDR2 |
| SEQ ID NO: 1170 (Chothia) | HCDR3 |
| SEQ ID NO: 1171 (IMGT) | HCDR1 |
| SEQ ID NO: 1172 (IMGT) | HCDR2 |
| SEQ ID NO: 1173 (IMGT) | HCDR3 |
| SEQ ID NO: 1174 (Combined Chothia and Rabat) | HCDR1 |
| SEQ ID NO: 1175 (Combined Chothia and Rabat) | HCDR2 |
| SEQ ID NO: 1176 (Combined Chothia and Rabat) | HCDR3 |
| SEQ ID NO: 1177 | VH |
| SEQ ID NO: 1178 | DNA VH |
| SEQ ID NO: 1179 (Rabat) | LCDR1 |
| SEQ ID NO: 1180 (Rabat) | LCDR2 |
| SEQ ID NO: 1181 (Rabat) | LCDR3 |
| SEQ ID NO: 1182 (Chothia) | LCDR1 |
| SEQ ID NO: 1183 (Chothia) | LCDR2 |
| SEQ ID NO: 1184 (Chothia) | LCDR3 |
| SEQ ID NO: 1185 (IMGT) | LCDR1 |
| SEQ ID NO: 1186 (IMGT) | LCDR2 |
| SEQ ID NO: 1187 (IMGT) | LCDR3 |
| SEQ ID NO: 1188 (Combined Chothia and Rabat) | LCDR1 |
| SEQ ID NO: 1189 (Combined Chothia and Rabat) | LCDR2 |
| SEQ ID NO: 1190 (Combined Chothia and Rabat) | LCDR3 |
| SEQ ID NO: 1191 | VL |
| SEQ ID NO: 1192 | DNA VL |
| SEQ ID NO: 1193 | Linker |
| SEQ ID NO: 1194 | scFv (VH-linker-VL) |
| SEQ ID NO: 1195 | DNA scFv (VH-linker-VL) |
| SEQ ID NO: 1196 | Full CAR amino acid sequence |
| SEQ ID NO: 1197 | Full CAR nucleic acid sequence |

CD20-C5H4

| | |
|---|---|
| SEQ ID NO: 1198 (Rabat) | HCDR1 |
| SEQ ID NO: 1199 (Rabat) | HCDR2 |
| SEQ ID NO: 1200 (Rabat) | HCDR3 |
| SEQ ID NO: 1201 (Chothia) | HCDR1 |
| SEQ ID NO: 1202 (Chothia) | HCDR2 |
| SEQ ID NO: 1203 (Chothia) | HCDR3 |
| SEQ ID NO: 1204 (IMGT) | HCDR1 |
| SEQ ID NO: 1205 (IMGT) | HCDR2 |
| SEQ ID NO: 1206 (IMGT) | HCDR3 |
| SEQ ID NO: 1207 (Combined Chothia and Rabat) | HCDR1 |
| SEQ ID NO: 1208 (Combined Chothia and Rabat) | HCDR2 |
| SEQ ID NO: 1209 (Combined Chothia and Rabat) | HCDR3 |
| SEQ ID NO: 1210 | VH |
| SEQ ID NO: 1211 | DNA VH |
| SEQ ID NO: 1212 (Rabat) | LCDR1 |
| SEQ ID NO: 1213 (Rabat) | LCDR2 |
| SEQ ID NO: 1214 (Rabat) | LCDR3 |
| SEQ ID NO: 1215 (Chothia) | LCDR1 |
| SEQ ID NO: 1216 (Chothia) | LCDR2 |
| SEQ ID NO: 1217 (Chothia) | LCDR3 |
| SEQ ID NO: 1218 (IMGT) | LCDR1 |
| SEQ ID NO: 1219 (IMGT) | LCDR2 |
| SEQ ID NO: 1220 (IMGT) | LCDR3 |
| SEQ ID NO: 1221 (Combined Chothia and Kabat) | LCDR1 |
| SEQ ID NO: 1222 (Combined Chothia and Kabat) | LCDR2 |
| SEQ ID NO: 1223 (Combined Chothia and Kabat) | LCDR3 |
| SEQ ID NO: 1224 | VL |
| SEQ ID NO: 1225 | DNA VL |
| SEQ ID NO: 1226 | Linker |
| SEQ ID NO: 1227 | scFv (VH-linker-VL) |
| SEQ ID NO: 1228 | DNA scFv (VH-linker-VL) |
| SEQ ID NO: 1229 | Full CAR amino acid sequence |
| SEQ ID NO: 1230 | Full CAR nucleic acid sequence |

CD20-C8H1

| | |
|---|---|
| SEQ ID NO: 1231 (Kabat) | HCDR1 |
| SEQ ID NO: 1232 (Kabat) | HCDR2 |
| SEQ ID NO: 1233 (Kabat) | HCDR3 |
| SEQ ID NO: 1234 (Chothia) | HCDR1 |
| SEQ ID NO: 1235 (Chothia) | HCDR2 |
| SEQ ID NO: 1236 (Chothia) | HCDR3 |
| SEQ ID NO: 1237 (IMGT) | HCDR1 |
| SEQ ID NO: 1238 (IMGT) | HCDR2 |
| SEQ ID NO: 1239 (IMGT) | HCDR3 |
| SEQ ID NO: 1240 (Combined Chothia and Kabat) | HCDR1 |
| SEQ ID NO: 1241 (Combined Chothia and Kabat) | HCDR2 |
| SEQ ID NO: 1242 (Combined Chothia and Kabat) | HCDR3 |
| SEQ ID NO: 1243 | VH |
| SEQ ID NO: 1244 | DNA VH |
| SEQ ID NO: 1245 (Kabat) | LCDR1 |
| SEQ ID NO: 1246 (Kabat) | LCDR2 |
| SEQ ID NO: 1247 (Kabat) | LCDR3 |
| SEQ ID NO: 1248 (Chothia) | LCDR1 |
| SEQ ID NO: 1249 (Chothia) | LCDR2 |
| SEQ ID NO: 1250 (Chothia) | LCDR3 |
| SEQ ID NO: 1251 (IMGT) | LCDR1 |
| SEQ ID NO: 1252 (IMGT) | LCDR2 |
| SEQ ID NO: 1253 (IMGT) | LCDR3 |
| SEQ ID NO: 1254 (Combined Chothia and Kabat) | LCDR1 |
| SEQ ID NO: 1255 (Combined Chothia and Kabat) | LCDR2 |
| SEQ ID NO: 1256 (Combined Chothia and Kabat) | LCDR3 |
| SEQ ID NO: 1257 | VL |
| SEQ ID NO: 1258 | DNA VL |
| SEQ ID NO: 1259 | Linker |
| SEQ ID NO: 1260 | scFv (VH-linker-VL) |
| SEQ ID NO: 1261 | DNA scFv (VH-linker-VL) |
| SEQ ID NO: 1262 | Full CAR amino acid sequence |
| SEQ ID NO: 1263 | Full CAR nucleic acid sequence |

CD20-C8H2

| | |
|---|---|
| SEQ ID NO: 1264 (Kabat) | HCDR1 |
| SEQ ID NO: 1265 (Kabat) | HCDR2 |
| SEQ ID NO: 1266 (Kabat) | HCDR3 |
| SEQ ID NO: 1267 (Chothia) | HCDR1 |
| SEQ ID NO: 1268 (Chothia) | HCDR2 |
| SEQ ID NO: 1269 (Chothia) | HCDR3 |
| SEQ ID NO: 1270 (IMGT) | HCDR1 |
| SEQ ID NO: 1271 (IMGT) | HCDR2 |
| SEQ ID NO: 1272 (IMGT) | HCDR3 |
| SEQ ID NO: 1273 (Combined Chothia and Kabat) | HCDR1 |
| SEQ ID NO: 1274 (Combined Chothia and Kabat) | HCDR2 |
| SEQ ID NO: 1275 (Combined Chothia and Kabat) | HCDR3 |
| SEQ ID NO: 1276 | VH |
| SEQ ID NO: 1277 | DNA VH |
| SEQ ID NO: 1278 (Kabat) | LCDR1 |
| SEQ ID NO: 1279 (Kabat) | LCDR2 |
| SEQ ID NO: 1280 (Kabat) | LCDR3 |
| SEQ ID NO: 1281 (Chothia) | LCDR1 |
| SEQ ID NO: 1282 (Chothia) | LCDR2 |
| SEQ ID NO: 1283 (Chothia) | LCDR3 |
| SEQ ID NO: 1284 (IMGT) | LCDR1 |
| SEQ ID NO: 1285 (IMGT) | LCDR2 |
| SEQ ID NO: 1286 (IMGT) | LCDR3 |
| SEQ ID NO: 1287 (Combined Chothia and Kabat) | LCDR1 |
| SEQ ID NO: 1288 (Combined Chothia and Kabat) | LCDR2 |
| SEQ ID NO: 1289 (Combined Chothia and Kabat) | LCDR3 |
| SEQ ID NO: 1290 | VL |
| SEQ ID NO: 1291 | DNA VL |
| SEQ ID NO: 1292 | Linker |
| SEQ ID NO: 1293 | scFv (VH-linker-VL) |
| SEQ ID NO: 1294 | DNA scFv (VH-linker-VL) |
| SEQ ID NO: 1295 | Full CAR amino acid sequence |
| SEQ ID NO: 1296 | Full CAR nucleic acid sequence |

CD20-C8H3

| | |
|---|---|
| SEQ ID NO: 1297 (Kabat) | HCDR1 |
| SEQ ID NO: 1298 (Kabat) | HCDR2 |
| SEQ ID NO: 1299 (Kabat) | HCDR3 |
| SEQ ID NO: 1300 (Chothia) | HCDR1 |
| SEQ ID NO: 1301 (Chothia) | HCDR2 |
| SEQ ID NO: 1302 (Chothia) | HCDR3 |
| SEQ ID NO: 1303 (IMGT) | HCDR1 |
| SEQ ID NO: 1304 (IMGT) | HCDR2 |
| SEQ ID NO: 1305 (IMGT) | HCDR3 |
| SEQ ID NO: 1306 (Combined Chothia and Kabat) | HCDR1 |
| SEQ ID NO: 1307 (Combined Chothia and Kabat) | HCDR2 |
| SEQ ID NO: 1308 (Combined Chothia and Kabat) | HCDR3 |
| SEQ ID NO: 1309 | VH |
| SEQ ID NO: 1310 | DNA VH |
| SEQ ID NO: 1311 (Rabat) | LCDR1 |
| SEQ ID NO: 1312 (Rabat) | LCDR2 |
| SEQ ID NO: 1313 (Rabat) | LCDR3 |
| SEQ ID NO: 1314 (Chothia) | LCDR1 |
| SEQ ID NO: 1315 (Chothia) | LCDR2 |
| SEQ ID NO: 1316 (Chothia) | LCDR3 |
| SEQ ID NO: 1317 (IMGT) | LCDR1 |
| SEQ ID NO: 1318 (IMGT) | LCDR2 |
| SEQ ID NO: 1319 (IMGT) | LCDR3 |
| SEQ ID NO: 1320 (Combined Chothia and Rabat) | LCDR1 |
| SEQ ID NO: 1321 (Combined Chothia and Rabat) | LCDR2 |
| SEQ ID NO: 1322 (Combined Chothia and Rabat) | LCDR3 |
| SEQ ID NO: 1323 | VL |
| SEQ ID NO: 1324 | DNA VL |
| SEQ ID NO: 1325 | Linker |
| SEQ ID NO: 1326 | scFv (VH-linker-VL) |
| SEQ ID NO: 1327 | DNA scFv (VH-linker-VL) |
| SEQ ID NO: 1328 | Full CAR amino acid sequence |
| SEQ ID NO: 1329 | Full CAR nucleic acid sequence |

CD20-C8H4

| | |
|---|---|
| SEQ ID NO: 1330 (Rabat) | HCDR1 |
| SEQ ID NO: 1331 (Rabat) | HCDR2 |
| SEQ ID NO: 1332 (Rabat) | HCDR3 |
| SEQ ID NO: 1333 (Chothia) | HCDR1 |
| SEQ ID NO: 1334 (Chothia) | HCDR2 |
| SEQ ID NO: 1335 (Chothia) | HCDR3 |
| SEQ ID NO: 1336 (IMGT) | HCDR1 |
| SEQ ID NO: 1337 (IMGT) | HCDR2 |
| SEQ ID NO: 1338 (IMGT) | HCDR3 |
| SEQ ID NO: 1339 (Combined Chothia and Rabat) | HCDR1 |
| SEQ ID NO: 1340 (Combined Chothia and Rabat) | HCDR2 |
| SEQ ID NO: 1341 (Combined Chothia and Rabat) | HCDR3 |
| SEQ ID NO: 1342 | VH |
| SEQ ID NO: 1343 | DNA VH |
| SEQ ID NO: 1344 (Rabat) | LCDR1 |
| SEQ ID NO: 1345 (Rabat) | LCDR2 |
| SEQ ID NO: 1346 (Rabat) | LCDR3 |
| SEQ ID NO: 1347 (Chothia) | LCDR1 |
| SEQ ID NO: 1348 (Chothia) | LCDR2 |
| SEQ ID NO: 1349 (Chothia) | LCDR3 |
| SEQ ID NO: 1350 (IMGT) | LCDR1 |
| SEQ ID NO: 1351 (IMGT) | LCDR2 |
| SEQ ID NO: 1352 (IMGT) | LCDR3 |
| SEQ ID NO: 1353 (Combined Chothia and Rabat) | LCDR1 |
| SEQ ID NO: 1354 (Combined Chothia and Rabat) | LCDR2 |
| SEQ ID NO: 1355 (Combined Chothia and Rabat) | LCDR3 |
| SEQ ID NO: 1356 | VL |
| SEQ ID NO: 1357 | DNA VL |
| SEQ ID NO: 1358 | Linker |
| SEQ ID NO: 1359 | scFv (VH-linker-VL) |
| SEQ ID NO: 1360 | DNA scFv (VH-linker-VL) |
| SEQ ID NO: 1361 | Full CAR amino acid sequence |
| SEQ ID NO: 1362 | Full CAR nucleic acid sequence |

CD20-C2

| | |
|---|---|
| SEQ ID NO: 1363 | VH |
| SEQ ID NO: 1364 | DNA VH |
| SEQ ID NO: 1365 | VL |
| SEQ ID NO: 1366 | DNA VL |

CD20-C3

| | |
|---|---|
| SEQ ID NO: 1367 | VH |
| SEQ ID NO: 1368 | DNA VH |
| SEQ ID NO: 1369 | VL |
| SEQ ID NO: 1370 | DNA VL |

CD20-C5

| | |
|---|---|
| SEQ ID NO: 1371 | VH |
| SEQ ID NO: 1372 | DNA VH |
| SEQ ID NO: 1373 | VL |
| SEQ ID NO: 1374 | DNA VL |

CD20-C6

| | |
|---|---|
| SEQ ID NO: 1375 | VH |
| SEQ ID NO: 1376 | DNA VH |
| SEQ ID NO: 1377 | VL |
| SEQ ID NO: 1378 | DNA VL |

CD20-C7

| | |
|---|---|
| SEQ ID NO: 1379 | VH |
| SEQ ID NO: 1380 | DNA VH |
| SEQ ID NO: 1381 | VL |
| SEQ ID NO: 1382 | DNA VL |

CD20-C8

| | |
|---|---|
| SEQ ID NO: 1383 | VH |
| SEQ ID NO: 1384 | DNA VH |
| SEQ ID NO: 1385 | VL |
| SEQ ID NO: 1386 | DNA VL |

CD20-3m

| | |
|---|---|
| SEQ ID NO: 1387 | VH |
| SEQ ID NO: 1388 | DNA VH |
| SEQ ID NO: 1389 | VL |
| SEQ ID NO: 1390 | DNA VL |
| SEQ ID NO: 1391 | Linker |
| SEQ ID NO: 1392 | scFv (VH-linker-VL) |

CD20-3J

| | |
|---|---|
| SEQ ID NO: 1393 | VH |
| SEQ ID NO: 1394 | DNA VH |
| SEQ ID NO: 1395 | VL |
| SEQ ID NO: 1396 | DNA VL |
| SEQ ID NO: 1397 | Linker |
| SEQ ID NO: 1398 | scFv (VH-linker-VL) |

CD20-3H5k1

| | |
|---|---|
| SEQ ID NO: 1399 | VH |
| SEQ ID NO: 1400 | DNA VH |
| SEQ ID NO: 1401 | VL |
| SEQ ID NO: 1402 | DNA VL |
| SEQ ID NO: 1403 | Linker |
| SEQ ID NO: 1404 | scFv (VH-linker-VL) |

CD20-3H5k3

| | |
|---|---|
| SEQ ID NO: 1405 | VH |
| SEQ ID NO: 1406 | DNA VH |
| SEQ ID NO: 1407 | VL |
| SEQ ID NO: 1408 | DNA VL |
| SEQ ID NO: 1409 | Linker |
| SEQ ID NO: 1410 | scFv (VH-linker-VL) |

CD20-Ofa

| | |
|---|---|
| SEQ ID NO: 1411 (Rabat) | HCDR1 |
| SEQ ID NO: 1412 (Rabat) | HCDR2 |
| SEQ ID NO: 1413 (Rabat) | HCDR3 |
| SEQ ID NO: 1414 (Chothia) | HCDR1 |
| SEQ ID NO: 1415 (Chothia) | HCDR2 |
| SEQ ID NO: 1416 (Chothia) | HCDR3 |
| SEQ ID NO: 1417 (IMGT) | HCDR1 |
| SEQ ID NO: 1418 (IMGT) | HCDR2 |
| SEQ ID NO: 1419 (IMGT) | HCDR3 |
| SEQ ID NO: 1420 | VH |
| SEQ ID NO: 1421 | DNA VH |
| SEQ ID NO: 1422 (Rabat) | LCDR1 |
| SEQ ID NO: 1423 (Rabat) | LCDR2 |
| SEQ ID NO: 1424 (Rabat) | LCDR3 |
| SEQ ID NO: 1425 (Chothia) | LCDR1 |
| SEQ ID NO: 1426 (Chothia) | LCDR2 |
| SEQ ID NO: 1427 (Chothia) | LCDR3 |
| SEQ ID NO: 1428 (IMGT) | LCDR1 |
| SEQ ID NO: 1429 (IMGT) | LCDR2 |
| SEQ ID NO: 1430 (IMGT) | LCDR3 |
| SEQ ID NO: 1431 | VL |
| SEQ ID NO: 1432 | DNA VL |
| SEQ ID NO: 1433 | Linker |
| SEQ ID NO: 1434 | scFv (VH-linker-VL) |
| SEQ ID NO: 1435 | DNA scFv (VH-linker-VL) |

CD20-3

| | |
|---|---|
| SEQ ID NO: 1436 | VH |
| SEQ ID NO: 1437 | VL |
| SEQ ID NO: 1438 | Linker |
| SEQ ID NO: 1439 | scFv (VH-linker-VL) |

CD20-8aBBz

| | |
|---|---|
| SEQ ID NO: 1440 | VH |
| SEQ ID NO: 1441 | DNA VH |
| SEQ ID NO: 1442 | VL |
| SEQ ID NO: 1443 | DNA VL |
| SEQ ID NO: 1444 | Linker |
| SEQ ID NO: 1445 | scFv (VH-linker-VL) |
| SEQ ID NO: 1446 | DNA scFv (VH-linker-VL) |

### CLL-1 CAR

[1081] In other embodiments, the CAR-expressing cells can specifically bind to CLL-1, e.g., can include a CAR molecule, or an antigen binding domain according to Table 2 of WO2016/014535, incorporated herein by reference. Exemplary amino acid and nucleotide sequences encoding the CLL-1 CAR molecules and antigen binding domains (e.g., including one, two, three VH CDRs; and one, two, three VL CDRs according to Kabat or Chothia) are provided in WO2016/014535.

### GFR ALPHA-4

[1082] In other embodiments, the CAR-expressing cells can specifically bind to GFR ALPHA-4, e.g., can include a CAR molecule, or an antigen binding domain according to Table 2 of WO2016/025880, incorporated herein by reference. Exemplary amino acid and nucleotide sequences encoding the GFR ALPHA-4 CAR molecules and antigen binding domains (e.g., including one, two, three VH CDRs; and one, two, three VL CDRs according to Kabat or Chothia) are provided in WO2016/025880.

[1083] In one embodiment, the antigen binding domain of any of the CAR molecules described herein (e.g., any of CD19, CD123, EGFRvIII, CD33, mesothelin, BCMA, and GFR ALPHA-4) comprises one, two, or three (e.g., all three) heavy chain CDRs, HC CDR1, HC CDR2 and HC CDR3, from an antibody listed above, and/or one, two, or three (e.g., all three) light chain CDRs, LC CDR1, LC CDR2 and LC CDR3, from an antigen binding domain listed above. In one embodiment, the antigen binding domain comprises a heavy chain variable region and/or a variable light chain region of an antibody listed or described above.

[1084] In one aspect, the anti-tumor antigen binding domain is a fragment, e.g., a single chain variable fragment (scFv). In one aspect, the anti-a cancer associate antigen as described herein binding domain is a Fv, a Fab, a (Fab′)2, or a bi-functional (e.g. bi-specific) hybrid antibody (e.g., Lanzavecchia et al., Eur. J. Immunol. 17, 105 (1987)). In one aspect, the antibodies and fragments thereof of the invention binds a cancer associate antigen as described herein protein with wild-type or enhanced affinity.

[1085] In some instances, scFvs can be prepared according to method known in the art (see, for example, Bird et al., (1988) Science 242:423-426 and Huston et al., (1988) Proc. Natl. Acad. Sci. USA 85:5879-5883). ScFv molecules can be produced by linking VH and VL regions together using flexible polypeptide linkers. The scFv molecules comprise a linker (e.g., a Ser-Gly linker) with an optimized length and/or amino acid composition. The linker length can greatly affect how the variable regions of a scFv fold and interact. In fact, if a short polypeptide linker is employed (e.g., between 5-10 amino acids) intrachain folding is prevented. Interchain folding is also required to bring the two variable regions together to form a functional epitope binding site. For examples of linker orientation and size see, e.g., Hollinger et al. 1993 Proc Natl Acad. Sci. U.S.A. 90:6444-6448, U.S. Patent Application Publication Nos. 2005/0100543, 2005/0175606, 2007/0014794, and PCT publication Nos. WO2006/020258 and WO2007/024715, is incorporated herein by reference.

[1086] In another aspect, the antigen binding domain is a T cell receptor (“TCR”), or a fragment thereof, for example, a single chain TCR (scTCR). Methods to make such TCRs are known in the art. See, e.g., Willemsen R A et al, Gene Therapy 7: 1369-1377 (2000); Zhang T et al, Cancer Gene Ther 11: 487-496 (2004); Aggen et al, Gene Ther. 19(4):365-74 (2012) (references are incorporated herein by its entirety). For example, scTCR can be engineered that contains the Vα and Vβ genes from a T cell clone linked by a linker (e.g., a flexible peptide). This approach is very useful to cancer associated target that itself is intracellar, however, a fragment of such antigen (peptide) is presented on the surface of the cancer cells by MHC.

### Additional Exemplary Antigen Binding Domains and CARs

[1087] In one embodiment, an antigen binding domain against GD2 is an antigen binding portion, e.g., CDRs, of an antibody described in, e.g., Mujoo et al., Cancer Res. 47(4):1098-1104 (1987); Cheung et al., Cancer Res 45(6):2642-2649 (1985), Cheung et al., J Clin Oncol 5(9):1430-1440 (1987), Cheung et al., J Clin Oncol 16(9):3053-3060 (1998), Handgretinger et al., Cancer Immunol Immunother 35(3):199-204 (1992). In some embodiments, an antigen binding domain against GD2 is an antigen binding portion of an antibody selected from mAb 14.18, 14G2a, ch14.18, hu14.18, 3F8, hu3F8, 3G6, 8B6, 60C3, 10B8, ME36.1, and 8H9, see e.g., WO2012033885, WO2013040371, WO2013192294, WO2013061273, WO2013123061, WO2013074916, and WO201385552. In some embodiments, an antigen binding domain against GD2 is an antigen binding portion of an antibody described in US Publication No.: 20100150910 or PCT Publication No.: WO 2011160119.

[1088] In one embodiment, an antigen binding domain against the Tn antigen, the sTn antigen, a Tn-O-glycopeptide antigen, or a sTn-O-glycopeptide antigen is an antigen binding portion, e.g., CDRs, of an antibody described in, e.g., US 2014/0178365, U.S. Pat. No. 8,440,798, EP 2083868 A2, Brooks et al., PNAS 107(22):10056-10061 (2010), and Stone et al., OncoImmunology 1(6):863-873(2012).

[1089] In one embodiment, an antigen binding domain against PSMA is an antigen binding portion, e.g., CDRs, of an antibody described in, e.g., Parker et al., Protein Expr Purif 89(2):136-145 (2013), US 20110268656 (J591 ScFv); Frigerio et al, European J Cancer 49(9):2223-2232 (2013) (scFvD2B); WO 2006125481 (mAbs 3/A12, 3/E7 and 3/F11) and single chain antibody fragments (scFv A5 and D7).

[1090] In one embodiment, an antigen binding domain against CD97 is an antigen binding portion, e.g., CDRs, of an antibody described in, e.g., U.S. Pat. No. 6,846,911; de Groot et al., J Immunol 183(6):4127-4134 (2009); or an antibody from R&D:MAB3734.

[1091] In one embodiment, an antigen binding domain against TAG72 is an antigen binding portion, e.g., CDRs, of an antibody described in, e.g., Hombach et al., Gastroenterology 113(4):1163-1170 (1997); and Abcam ab691.

[1092] In one embodiment, an antigen binding domain against CD44v6 is an antigen binding portion, e.g., CDRs, of an antibody described in, e.g., Casucci et al., Blood 122(20):3461-3472 (2013).

[1093] In one embodiment, an antigen binding domain against CEA is an antigen binding portion, e.g., CDRs, of an antibody described in, e.g., Chmielewski et al., Gastoenterology 143(4):1095-1107 (2012).

[1094] In one embodiment, an antigen binding domain against EPCAM is an antigen binding portion, e.g., CDRS, of an antibody selected from MT110, EpCAM-CD3 bispecific Ab (see, e.g., clinicaltrials.gov/ct2/show/NCT00635596); Edrecolomab; 3622W94; ING-1; and adecatumumab (MT201).

[1095] In one embodiment, an antigen binding domain against KIT is an antigen binding portion, e.g., CDRs, of an antibody described in, e.g., U.S. Pat. No. 7,915,391, US20120288506, and several commercial catalog antibodies.

[1096] In one embodiment, an antigen binding domain against IL-13Ra2 is an antigen binding portion, e.g., CDRs, of an antibody described in, e.g., WO2008/146911, WO2004087758, several commercial catalog antibodies, and WO2004087758.

[1097] In one embodiment, an antigen binding domain against CD171 is an antigen binding portion, e.g., CDRs, of an antibody described in, e.g., Hong et al., J Immunother 37(2):93-104 (2014).

[1098] In one embodiment, an antigen binding domain against PSCA is an antigen binding portion, e.g., CDRs, of an antibody described in, e.g., Morgenroth et al., Prostate 67(10):1121-1131 (2007) (scFv 7F5); Nejatollahi et al., J of Oncology 2013(2013), article ID 839831 (scFv C5-II); and US Pat Publication No. 20090311181.

[1099] In one embodiment, an antigen binding domain against MAD-CT-2 is an antigen binding portion, e.g., CDRs, of an antibody described in, e.g., PMID: 2450952; U.S. Pat. No. 7,635,753.

[1100] In one embodiment, an antigen binding domain against Folate receptor alpha is an antigen binding portion, e.g., CDRs, of the antibody IMGN853, or an antibody described in US20120009181; U.S. Pat. No. 4,851,332, LK26: U.S. Pat. No. 5,952,484.

[1101] In one embodiment, an antigen binding domain against ERBB2 (Her2/neu) is an antigen binding portion, e.g., CDRs, of the antibody trastuzumab, or pertuzumab.

[1102] In one embodiment, an antigen binding domain against MUC1 is an antigen binding portion, e.g., CDRs, of the antibody SAR566658.

[1103] In one embodiment, the antigen binding domain against EGFR is antigen binding portion, e.g., CDRs, of the antibody cetuximab, panitumumab, zalutumumab, nimotuzumab, or matuzumab.

[1104] In one embodiment, an antigen binding domain against NCAM is an antigen binding portion, e.g., CDRs, of the antibody clone 2-2B: MAB5324 (EMD Millipore)

[1105] In one embodiment, an antigen binding domain against CAIX is an antigen binding portion, e.g., CDRs, of the antibody clone 303123 (R&D Systems).

[1106] In one embodiment, an antigen binding domain against Fos-related antigen 1 is an antigen binding portion, e.g., CDRs, of the antibody 12F9 (Novus Biologicals).

[1107] In one embodiment, an antigen binding domain against SSEA-4 is an antigen binding portion, e.g., CDRs, of antibody MC813 (Cell Signaling), or other commercially available antibodies.

[1108] In one embodiment, an antigen binding domain against PDGFR-beta is an antigen binding portion, e.g., CDRs, of an antibody Abcam ab32570.

[1109] In one embodiment, an antigen binding domain against ALK is an antigen binding portion, e.g., CDRs, of an antibody described in, e.g., Mino-Kenudson et al., Clin Cancer Res 16(5):1561-1571 (2010).

[1110] In one embodiment, an antigen binding domain against plysialic acid is an antigen binding portion, e.g., CDRs, of an antibody described in, e.g., Nagae et al., J Biol Chem 288(47):33784-33796 (2013).

[1111] In one embodiment, an antigen binding domain against PLAC1 is an antigen binding portion, e.g., CDRs, of an antibody described in, e.g., Ghods et al., Biotechnol Appl Biochem 2013 doi:10.1002/bab.1177.

[1112] In one embodiment, an antigen binding domain against GloboH is an antigen binding portion of the antibody VK9; or an antibody described in, e.g., Kudryashov V et al, Glycoconj J.15(3):243-9 (1998), Lou et al., Proc Natl Acad Sci USA 111(7):2482-2487 (2014); MBr1: Bremer E-G et al. J Biol Chem 259:14773-14777 (1984).

[1113] In one embodiment, an antigen binding domain against NY-BR-1 is an antigen binding portion, e.g., CDRs of an antibody described in, e.g., Jager et al., Appl Immunohistochem Mol Morphol 15(1):77-83 (2007).

[1114] In one embodiment, an antigen binding domain against sperm protein 17 is an antigen binding portion, e.g., CDRs, of an antibody described in, e.g., Song et al., Target Oncol 2013 Aug. 14 (PMID: 23943313); Song et al., Med Oncol 29(4):2923-2931 (2012).

[1115] In one embodiment, an antigen binding domain against TRP-2 is an antigen binding portion, e.g., CDRs, of an antibody described in, e.g., Wang et al, J Exp Med. 184(6):2207-16 (1996).

[1116] In one embodiment, an antigen binding domain against CYP1B1 is an antigen binding portion, e.g., CDRs, of an antibody described in, e.g., Maecker et al, Blood 102 (9): 3287-3294 (2003).

[1117] In one embodiment, an antigen binding domain against RAGE-1 is an antigen binding portion, e.g., CDRs, of the antibody MAB5328 (EMD Millipore).

[1118] In one embodiment, an antigen binding domain against human telomerase reverse transcriptase is an antigen binding portion, e.g., CDRs, of the antibody cat no: LS-B95-100 (Lifespan Biosciences)

[1119] In one embodiment, an antigen binding domain against intestinal carboxyl esterase is an antigen binding portion, e.g., CDRs, of the antibody 4F12: cat no: LS-B6190-50 (Lifespan Biosciences).

[1120] In one embodiment, an antigen binding domain against mut hsp70-2 is an antigen binding portion, e.g., CDRs, of the antibody Lifespan Biosciences: monoclonal: cat no: LS-C133261-100 (Lifespan Biosciences).

[1121] In one embodiment, an antigen binding domain against MAD-CT-2 is an antigen binding portion, e.g., CDRs, of an antibody described in, e.g., PMID: 2450952; U.S. Pat. No. 7,635,753.

[1122] In one embodiment, the antigen binding domain comprises one, two, or three (e.g., all three) heavy chain CDRs, HC CDR1, HC CDR2 and HC CDR3, from an antibody listed above, and/or one, two, or three (e.g., all three) light chain CDRs, LC CDR1, LC CDR2 and LC CDR3, from an antibody listed above. In one embodiment, the antigen binding domain comprises a heavy chain variable region and/or a variable light chain region of an antibody listed above.

[1123] In some embodiments, the antigen binding domain of a CAR targets a tumor antigen that is an antigen expressed on a myeloid tumor (either a surface antigen or presented by MHC), and a cell comprising such a CAR recognizes a myeloid tumor antigen.

[1124] In an embodiment, the myeloid tumor antigen is an antigen that is preferentially or specifically expressed on the surface of a myeloid tumor cell.

[1125] In one embodiment, the antigen-binding domain of a CAR can be chosen such that a myeloid tumor population is targeted. Alternatively, when targeting of more than one type of myeloid tumor is desired, an antigen binding domain that targets a myeloid tumor antigen that is expressed by more than one, e.g., all, of the myeloid tumors to be targeted can be selected.

[1126] A CAR can target the following additional tumor antigens: CD123, CD34, Flt3, CD33 and CLL-1. In embodiments, the tumor antigen is selected from CD123, CD33 and CLL-1. In some embodiments, the tumor antigen is CD123. In some embodiments, the tumor antigen is CD33. In some embodiments, the tumor antigen is CD34. In some embodiments, the tumor antigen is Flt3. In embodiments, the tumor antigen is CLL-1. In embodiments, the antigen binding domain targets the human antigen.

[1127] In one aspect, the antigen-binding domain of a CAR binds to CD123, e.g., human CD123. Any known CD123 binding domain may be used in the invention. In one embodiment, an antigen binding domain against CD123 is an antigen binding portion, e.g., CDRs or VH and VL, of an antibody, antigen-binding fragment or CAR described in, e.g., PCT publication WO2014/130635, incorporated herein by reference. In one embodiment, an antigen binding domain against CD123 is an antigen binding portion, e.g., CDRs or VH and VL, of an antibody, antigen-binding fragment or CAR described in, e.g., PCT publication WO/2016/028896, incorporated herein by reference. In one embodiment, an antigen binding domain against CD123 is an antigen binding portion, e.g., CDRs, of an antibody, antigen-binding fragment, or CAR described in, e.g., PCT publication WO1997/024373, WO2008/127735 (e.g., a CD123 binding domain of 26292, 32701, 37716 or 32703), WO2014/138805 (e.g., a CD123 binding domain of CSL362), WO2014/138819, WO2013/173820, WO2014/144622, WO2001/66139, WO2010/126066 (e.g., the CD123 binding domain of any of Old4, Old5, Old17, Old19, New102, or Old6), WO2014/144622, WO2016/028896, or US2009/0252742, incorporated herein by reference. In embodiments, the antigen binding domain is or is derived from a murine anti-human CD123 binding domain. In embodiments, the antigen binding domain is a humanized antibody or antibody fragment, e.g., scFv domain. In an embodiment, the antigen binding domain is a human antibody or antibody fragment that binds to human CD123. In embodiments, the antigen binding domain is an scFv domain which includes a light chain variable region (VL) and a heavy chain variable region (VH). The VL and VH may attached by a linker described herein, e.g., comprising the sequence GGGGSGGGGSGGGGS (SEQ ID NO: 142), and may be in any orientation, e.g., VL-linker-VH, or VH-linker-VL.

[1128] In some embodiments, the antigen binding domain of a CAR targets a B-Cell antigen. In an embodiment, the B cell antigen is an antigen that is preferentially or specifically expressed on the surface of the B cell. The antigen can be expressed on the surface of any one of the following types of B cells: progenitor B cells (e.g., pre-B cells or pro-B cells), early pro-B cells, late pro-B cells, large pre-B cells, small pre-B cells, immature B cells, e.g., naïve B cells, mature B cells, plama B cells, plasmablasts, memory B cells, B-1 cells, B-2 cells, marginal-zone B cells, follicular B cells, germinal center B cells, or regulatory B cells (Bregs).

[1129] The present disclosure provides CARs that can target the following antigens: CD19; CD123; CD22; CD30; CD171; CS-1; C-type lectin-like molecule-1, CD33; epidermal growth factor receptor variant III (EGFRvIII); ganglioside G2 (GD2); ganglioside GD3; TNF receptor family member; B-cell maturation antigen; Tn antigen ((Tn Ag) or (GalNAcα-Ser/Thr)); prostate-specific membrane antigen (PSMA); Receptor tyrosine kinase-like orphan receptor 1 (ROR1); Fms-Like Tyrosine Kinase 3 (FLT3); Tumor-associated glycoprotein 72 (TAG72); CD38; CD44v6; Carcinoembryonic antigen (CEA); Epithelial cell adhesion molecule (EPCAM); B7H3 (CD276); KIT (CD117); Interleukin-13 receptor subunit alpha-2; Mesothelin; Interleukin 11 receptor alpha (IL-11Ra); prostate stem cell antigen (PSCA); Protease Serine 21; vascular endothelial growth factor receptor 2 (VEGFR2); Lewis(Y) antigen; CD24; Platelet-derived growth factor receptor beta (PDGFR-beta); Stage-specific embryonic antigen-4 (SSEA-4); CD20; Folate receptor alpha; Receptor tyrosine-protein kinase ERBB2 (Her2/neu); Mucin 1, cell surface associated (MUC1); epidermal growth factor receptor (EGFR); neural cell adhesion molecule (NCAM); Prostase; prostatic acid phosphatase (PAP); elongation factor 2 mutated (ELF2M); Ephrin B2; fibroblast activation protein alpha (FAP); insulin-like growth factor 1 receptor (IGF-I receptor), carbonic anhydrase IX (CAIX); Proteasome (Prosome, Macropain) Subunit, Beta Type, 9 (LMP2); glycoprotein 100 (gp100); oncogene fusion protein consisting of breakpoint cluster region (BCR) and Abelson murine leukemia viral oncogene homolog 1 (Ab1) (bcr-ab1); tyrosinase; ephrin type-A receptor 2 (EphA2); Fucosyl GM1; sialyl Lewis adhesion molecule (sLe); ganglioside GM3; transglutaminase 5 (TGS5); high molecular weight-melanoma-associated antigen (HMWMAA); o-acetyl-GD2 ganglioside (OAcGD2); Folate receptor beta; tumor endothelial marker 1 (TEM1/CD248); tumor endothelial marker 7-related (TEM7R); claudin 6 (CLDN6); thyroid stimulating hormone receptor (TSHR); G protein-coupled receptor class C group 5, member D (GPRC5D); chromosome X open reading frame 61 (CXORF61); CD97; CD179a; anaplastic lymphoma kinase (ALK); Polysialic acid; placenta-specific 1 (PLAC1); hexasaccharide portion of globoH glycoceramide (GloboH); mammary gland differentiation antigen (NY-BR-1); uroplakin 2 (UPK2); Hepatitis A virus cellular receptor 1 (HAVCR1); adrenoceptor beta 3 (ADRB3); pannexin 3 (PANX3); G protein-coupled receptor 20 (GPR20); lymphocyte antigen 6 complex, locus K 9 (LY6K); Olfactory receptor 51E2 (OR51E2); TCR Gamma Alternate Reading Frame Protein (TARP); Wilms tumor protein (WT1); Cancer/testis antigen 1 (NY-ESO-1); Cancer/testis antigen 2 (LAGE-1a); Melanoma-associated antigen 1 (MAGE-A1); ETS translocation-variant gene 6, located on chromosome 12p (ETV6-AML); sperm protein 17 (SPA17); X Antigen Family, Member 1A (XAGE1); angiopoietin-binding cell surface receptor 2 (Tie 2); melanoma cancer testis antigen-1 (MAD-CT-1); melanoma cancer testis antigen-2 (MAD-CT-2); Fos-related antigen 1; tumor protein p53 (p53); p53 mutant; prostein; surviving; telomerase; prostate carcinoma tumor antigen-1, melanoma antigen recognized by T cells 1; Rat sarcoma (Ras) mutant; human Telomerase reverse transcriptase (hTERT); sarcoma translocation breakpoints; melanoma inhibitor of apoptosis (ML-IAP); ERG (transmembrane protease, serine 2 (TMPRSS2) ETS fusion gene); N-Acetyl glucosaminyl-transferase V (NA17); paired box protein Pax-3 (PAX3); Androgen receptor; Cyclin B1; v-myc avian myelocytomatosis viral oncogene neuroblastoma derived homolog (MYCN); Ras Homolog Family Member C (RhoC); Tyrosinase-related protein 2 (TRP-2); Cytochrome P450 1B1 (CYP1B1); CCCTC-Binding Factor (Zinc Finger Protein)-Like, Squamous Cell Carcinoma Antigen Recognized By T Cells 3 (SART3); Paired box protein Pax-5 (PAX5); proacrosin binding protein sp32 (OY-TES1); lymphocyte-specific protein tyrosine kinase (LCK); A kinase anchor protein 4 (AKAP-4); synovial sarcoma, X breakpoint 2 (SSX2); Receptor for Advanced Glycation Endproducts (RAGE-1); renal ubiquitous 1 (RU1); renal ubiquitous 2 (RU2); legumain; human papilloma virus E6 (HPV E6); human papilloma virus E7 (HPV E7); intestinal carboxyl esterase; heat shock protein 70-2 mutated (mut hsp70-2); CD79a; CD79b; CD72; Leukocyte-associated immunoglobulin-like receptor 1 (LAIR1); Fc fragment of IgA receptor (FCAR or CD89); Leukocyte immunoglobulin-like receptor subfamily A member 2 (LILRA2); CD300 molecule-like family member f (CD300LF); C-type lectin domain family 12 member A (CLEC12A); bone marrow stromal cell antigen 2 (BST2); EGF-like module-containing mucin-like hormone receptor-like 2 (EMR2); lymphocyte antigen 75 (LY75); Glypican-3 (GPC3); Fc receptor-like 5 (FCRL5); immunoglobulin lambda-like polypeptide 1 (IGLL1); TNF receptor family member; Fms-Like Tyrosine Kinase 3 (FL T3); CD10, CD19, CD20, CD21, CD22, CD23, CD24, CD25, CD37, CD38, CD53, CD72, CD73, CD74, CD75, CD77, CD79a, CD79b, CD80, CD81, CD82, CD83, CD84, CD85, ROR1, BCMA, CD86, and CD179b. Other B cell antigens that can be targeted by a CAR described herein include: CD1a, CD1b, CD1c, CD1d, CD2, CD5, CD6, CD9, CD11a, CD11b, CD11c, CD17, CD18, CD26, CD27, CD29, CD30, CD31, CD32a, CD32b, CD35, CD38, CD39, CD40, CD44, CD45, CD45RA, CD45RB, CD45RC, CD45RO, CD46, CD47, CD48, CD49b, CD49c, CD49d, CD50, CD52, CD54, CD55, CD58, CD60a, CD62L, CD63, CD63, CD68 CD69, CD70, CD85E, CD85I, CD85J, CD92, CD95, CD97, CD98, CD99, CD100, CD102, CD108, CD119, CD120a, CD120b, CD121b, CD122, CD124, CD125, CD126, CD130, CD132, CD137, CD138, CD139, CD147, CD148, CD150, CD152, CD162, CD164, CD166, CD167a, CD170, CD175, CD175s, CD180, CD184, CD185, CD192, CD196, CD197, CD200, CD205, CD210a, CDw210b, CD212, CD213a1, CD213a2, CD215, CD217, CD218a, CD218b, CD220, CD221, CD224, CD225, CD226, CD227, CD229, CD230, CD232, CD252, CD253, CD257, CD258, CD261, CD262, CD263, CD264, CD267, CD268, CD269, CD270, CD272, CD274, CD275, CD277, CD279, CD283, CD289, CD290, CD295, CD298, CD300a, CD300c, CD305, CD306, CD307a, CD307b, CD307c, CD307d, CD307e, CD314, CD315, CD316, CD317, CD319, CD321, CD327, CD328, CD329, CD338, CD351, CD352, CD353, CD354, CD355, CD357, CD358, CD360, CD361, CD362, and CD363.

[1130] In another embodiment, the antigen targeted by the CAR is chosen from CD19, BCMA, CD20, CD22, FcRn5, FcRn2, CS-1 and CD138. In an embodiment, the antigen targeted by the CAR is CD19. In an embodiment, the antigen targeted by the CAR is CD20. In an embodiment, the antigen targeted by the CAR is CD22. In an embodiment, the antigen targeted by the CAR is BCMA. In an embodiment, the antigen targeted by the CAR is FcRn5. In an embodiment, the antigen targeted by the CAR is FcRn2. In an embodiment, the antigen targeted by the CAR is CS-1. In an embodiment, the antigen targeted by the CAR is CD138.

[1131] In one embodiment, the antigen-binding domain of a CAR, e.g., the CAR expressed by a cell of the invention (e.g., a cell that also expresses a CAR), can be chosen such that a preferred B cell population is targeted. For example, in an embodiment where targeting of B regulatory cells is desired, an antigen binding domain is selected that targets an antigen that is expressed on regulatory B cells and not on other B cell populations, e.g., plasma B cells and memory B cells. Cell surface markers expressed on regulatory B cells include: CD19, CD24, CD25, CD38, or CD86, or markers described in He et al., 2014, J Immunology Research, Article ID 215471. When targeting of more than one type of B cells is desired, an antigen binding domain that targets an antigen that is expressed by all of the B cells to be targeted can be selected.

### CAR Transmembrane Domain

[1132] With respect to the transmembrane domain, in various embodiments, a CAR can be designed to comprise a transmembrane domain that is attached to the extracellular domain of the CAR. A transmembrane domain can include one or more additional amino acids adjacent to the transmembrane region, e.g., one or more amino acid associated with the extracellular region of the protein from which the transmembrane was derived (e.g., 1, 2, 3, 4, 5, 6, 7, 8, 9, 10 up to 15 amino acids of the extracellular region) and/or one or more additional amino acids associated with the intracellular region of the protein from which the transmembrane protein is derived (e.g., 1, 2, 3, 4, 5, 6, 7, 8, 9, 10 up to 15 amino acids of the intracellular region). In one aspect, the transmembrane domain is one that is associated with one of the other domains of the CAR. In some instances, the transmembrane domain can be selected or modified by amino acid substitution to avoid binding of such domains to the transmembrane domains of the same or different surface membrane proteins, e.g., to minimize interactions with other members of the receptor complex. In one aspect, the transmembrane domain is capable of homodimerization with another CAR on the cell surface of a CAR-expressing cell. In a different aspect, the amino acid sequence of the transmembrane domain may be modified or substituted so as to minimize interactions with the binding domains of the native binding partner present in the same CART.

[1133] The transmembrane domain may be derived either from a natural or from a recombinant source. Where the source is natural, the domain may be derived from any membrane-bound or transmembrane protein. In one aspect the transmembrane domain is capable of signaling to the intracellular domain(s) whenever the CAR has bound to a target. A transmembrane domain of particular use in this invention may include at least the transmembrane region(s) of e.g., the alpha, beta or zeta chain of the T-cell receptor, CD28, CD27, CD3 epsilon, CD45, CD4, CD5, CD8, CD9, CD16, CD22, CD33, CD37, CD64, CD80, CD86, CD134, CD137, CD154. In some embodiments, a transmembrane domain may include at least the transmembrane region(s) of, e.g., KIR2DS2, OX40, CD2, CD27, LFA-1 (CD11a, CD18), ICOS (CD278), 4-1BB (CD137), GITR, CD40, BAFFR, HVEM (LIGHTR), SLAMF7, NKp80 (KLRF1), NKp44, NKp30, NKp46, CD160, CD19, IL2R beta, IL2R gamma, IL7R α, ITGA1, VLA1, CD49a, ITGA4, IA4, CD49D, ITGA6, VLA-6, CD49f, ITGAD, CD11d, ITGAE, CD103, ITGAL, CD11a, LFA-1, ITGAM, CD11b, ITGAX, CD11c, ITGB1, CD29, ITGB2, CD18, LFA-1, ITGB7, TNFR2, DNAM1 (CD226), SLAMF4 (CD244, 2B4), CD84, CD96 (Tactile), CEACAM1, CRTAM, Ly9 (CD229), CD160 (BY55), PSGL1, CD100 (SEMA4D), SLAMF6 (NTB-A, Ly108), SLAM (SLAMF1, CD150, IPO-3), BLAME (SLAMF8), SELPLG (CD162), LTBR, PAG/Cbp, NKG2D, NKG2C.

[1134] In some instances, the transmembrane domain can be attached to the extracellular region of the CAR, e.g., the antigen binding domain of the CAR, via a hinge, e.g., a hinge from a human protein. For example, in one embodiment, the hinge can be a human Ig (immunoglobulin) hinge, e.g., an IgG4 hinge, or a CD8a hinge. In one embodiment, the hinge or spacer comprises (e.g., consists of) the amino acid sequence of SEQ ID NO: 147. In one aspect, the transmembrane domain comprises (e.g., consists of) a transmembrane domain of SEQ ID NO: 155.

[1135] In one aspect, the hinge or spacer comprises an IgG4 hinge. For example, in one embodiment, the hinge or spacer comprises a hinge of the amino acid sequence ESKYGPPCPPCPAPEFLGGPSVFLFPPKPKDTLMISRTPEVTCVVVDVSQEDPEVQFNWYVDGVE VHNAKTKPREEQFNSTYRVVSVLTVLHQDWLNGKEYKCKVSNKGLPSSIEKTISKAKGQPREPQ VYTLPPSQEEMTKNQVSLTCLVKGFYPSDIAVEWESNGQPENNYKTTPPVLDSDGSFFLYSRLTV DKSRWQEGNVFSCSVMHEALHNHYTQKSLSLSLGKM (SEQ ID NO: 149). In some embodiments, the hinge or spacer comprises a hinge encoded by a nucleotide sequence of

(SEQ ID NO: 150)
GAGAGCAAGTACGGCCCTCCCTGCCCCCCTTGCCCTGCCCCCGAGTTC
CTGGGCGGACCCAGCGTGTTCCTGTTCCCCCCCAAGCCCAAGGACACC
CTGATGATCAGCCGGACCCCCGAGGTGACCTGTGTGGTGGTGGACGTG
TCCCAGGAGGACCCCGAGGTCCAGTTCAACTGGTACGTGGACGGCGTG
GAGGTGCACAACGCCAAGACCAAGCCCCGGGAGGAGCAGTTCAATAGC
ACCTACCGGGTGGTGTCCGTGCTGACCGTGCTGCACCAGGACTGGCTG
AACGGCAAGGAATACAAGTGTAAGGTGTCCAACAAGGGCCTGCCCAGC
AGCATCGAGAAAACCATCAGCAAGGCCAAGGGCCAGCCTCGGGAGCCC
CAGGTGTACACCCTGCCCCCTAGCCAAGAGGAGATGACCAAGAACCAG
GTGTCCCTGACCTGCCTGGTGAAGGGCTTCTACCCCAGCGACATCGCC
GTGGAGTGGGAGAGCAACGGCCAGCCCGAGAACAACTACAAGACCACC
CCCCCTGTGCTGGACAGCGACGGCAGCTTCTTCCTGTACAGCCGGCTG
ACCGTGGACAAGAGCCGGTGGCAGGAGGGCAACGTCTTTAGCTGCTCC
GTGATGCACGAGGCCCTGCACAACCACTACACCCAGAAGAGCCTGAGC
CTGTCCCTGGGCAAGATG.

[1136] In one aspect, the hinge or spacer comprises an IgD hinge. For example, in one embodiment, the hinge or spacer comprises a hinge of the amino acid sequence RWPESPKAQASSVPTAQPQAEGSLAKATTAPATTRNTGRGGEEKKKEKEKEEQEERETKTPECP SHTQPLGVYLLTPAVQDLWLRDKATFTCFVVGSDLKDAHLTWEVAGKVPTGGVEEGLLERHSN GSQSQHSRLTLPRSLWNAGTSVTCTLNHPSLPPQRLMALREPAAQAPVKLSLNLLASSDPPEAAS WLLCEVSGFSPPNILLMWLEDQREVNTSGFAPARPPPQPGSTTFWAWSVLRVPAPPSPQPATYTC VVSHEDSRTLLNASRSLEVSYVTDH (SEQ ID NO: 151). In some embodiments, the hinge or spacer comprises a hinge encoded by a nucleotide sequence of

(SEQ ID NO: 152)
AGGTGGCCCGAAAGTCCCAAGGCCCAGGCATCTAGTGTTCCTACTGCA
CAGCCCCAGGCAGAAGGCAGCCTAGCCAAAGCTACTACTGCACCTGCC
ACTACGCGCAATACTGGCCGTGGCGGGGAGGAGAAGAAAAAGGAGAAA
GAGAAAGAAGAACAGGAAGAGAGGGAGACCAAGACCCCTGAATGTCCA
TCCCATACCCAGCCGCTGGGCGTCTATCTCTTGACTCCCGCAGTACAG
GACTTGTGGCTTAGAGATAAGGCCACCTTTACATGTTTCGTCGTGGGC
TCTGACCTGAAGGATGCCCATTTGACTTGGGAGGTTGCCGGAAAGGTA
CCCACAGGGGGGGTTGAGGAAGGGTTGCTGGAGCGCCATTCCAATGGC
TCTCAGAGCCAGCACTCAAGACTCACCCTTCCGAGATCCCTGTGGAAC
GCCGGGACCTCTGTCACATGTACTCTAAATCATCCTAGCCTGCCCCCA
CAGCGTCTGATGGCCCTTAGAGAGCCAGCCGCCCAGGCACCAGTTAAG
CTTAGCCTGAATCTGCTCGCCAGTAGTGATCCCCCAGAGGCCGCCAGC
TGGCTCTTATGCGAAGTGTCCGGCTTTAGCCCGCCCAACATCTTGCTC
ATGTGGCTGGAGGACCAGCGAGAAGTGAACACCAGCGGCTTCGCTCCA
GCCCGGCCCCCACCCCAGCCGGGTTCTACCACATTCTGGGCCTGGAGT
GTCTTAAGGGTCCCAGCACCACCTAGCCCCCAGCCAGCCACATACACC
TGTGTTGTGTCCCATGAAGATAGCAGGACCCTGCTAAATGCTTCTAGG
AGTCTGGAGGTTTCCTACGTGACTGACCATT.

[1137] In one aspect, the transmembrane domain may be recombinant, in which case it will comprise predominantly hydrophobic residues such as leucine and valine. In one aspect a triplet of phenylalanine, tryptophan and valine can be found at each end of a recombinant transmembrane domain.

[1138] Optionally, a short oligo- or polypeptide linker, between 2 and 10 amino acids in length may form the linkage between the transmembrane domain and the cytoplasmic region of the CAR. A glycine-serine doublet provides a particularly suitable linker. For example, in one aspect, the linker comprises the amino acid sequence of GGGGSGGGGS (SEQ ID NO: 153). In some embodiments, the linker is encoded by a nucleotide sequence of GGTGGCGGAGGTTCTGGAGGTGGAGGTTCC (SEQ ID NO: 154).

[1139] In one aspect, the hinge or spacer comprises a KIR2DS2 hinge.

### Cytoplasmic Domain

[1140] The cytoplasmic domain or region of the CAR includes an intracellular signaling domain. An intracellular signaling domain is generally responsible for activation of at least one of the normal effector functions of the immune cell in which the CAR has been introduced.

[1141] Examples of intracellular signaling domains for use in a CAR described herein include the cytoplasmic sequences of the T cell receptor (TCR) and co-receptors that act in concert to initiate signal transduction following antigen receptor engagement, as well as any derivative or variant of these sequences and any recombinant sequence that has the same functional capability.

[1142] It is known that signals generated through the TCR alone are insufficient for full activation of the T cell and that a secondary and/or costimulatory signal is also required. Thus, T cell activation can be said to be mediated by two distinct classes of cytoplasmic signaling sequences: those that initiate antigen-dependent primary activation through the TCR (primary intracellular signaling domains) and those that act in an antigen-independent manner to provide a secondary or costimulatory signal (secondary cytoplasmic domain, e.g., a costimulatory domain).

[1143] A primary signaling domain regulates primary activation of the TCR complex either in a stimulatory way, or in an inhibitory way. Primary intracellular signaling domains that act in a stimulatory manner may contain signaling motifs which are known as immunoreceptor tyrosine-based activation motifs or ITAMs.

[1144] Examples of ITAM containing primary intracellular signaling domains that are of particular use in the invention include those of TCR zeta, FcR gamma, FcR beta, CD3 gamma, CD3 delta, CD3 epsilon, CD5, CD22, CD79a, CD79b, CD278 (also known as “ICOS”), FcεRI, DAP10, DAP12, and CD66d. In one embodiment, a CAR of the invention comprises an intracellular signaling domain, e.g., a primary signaling domain of CD3-zeta, e.g., a CD3-zeta sequence described herein.

[1145] In one embodiment, a primary signaling domain comprises a modified ITAM domain, e.g., a mutated ITAM domain which has altered (e.g., increased or decreased) activity as compared to the native ITAM domain. In one embodiment, a primary signaling domain comprises a modified ITAM-containing primary intracellular signaling domain, e.g., an optimized and/or truncated ITAM-containing primary intracellular signaling domain. In an embodiment, a primary signaling domain comprises one, two, three, four or more ITAM motifs.

### Costimulatory Signaling Domain

[1146] The intracellular signalling domain of the CAR can comprise the CD3-zeta signaling domain by itself or it can be combined with any other desired intracellular signaling domain(s) useful in the context of a CAR of the invention. For example, the intracellular signaling domain of the CAR can comprise a CD3 zeta chain portion and a costimulatory signaling domain. The costimulatory signaling domain refers to a portion of the CAR comprising the intracellular domain of a costimulatory molecule. In one embodiment, the intracellular domain is designed to comprise the signaling domain of CD3-zeta and the signaling domain of CD28. In one aspect, the intracellular domain is designed to comprise the signaling domain of CD3-zeta and the signaling domain of ICOS.

[1147] A costimulatory molecule can be a cell surface molecule other than an antigen receptor or its ligands that is required for an efficient response of lymphocytes to an antigen. Examples of such molecules include CD27, CD28, 4-1BB (CD137), OX40, CD30, CD40, PD-1, ICOS, lymphocyte function-associated antigen-1 (LFA-1), CD2, CD7, LIGHT, NKG2C, B7-H3, and a ligand that specifically binds with CD83, and the like. For example, CD27 costimulation has been demonstrated to enhance expansion, effector function, and survival of human CART cells in vitro and augments human T cell persistence and antitumor activity in vivo (Song et al. Blood. 2012; 119(3):696-706). Further examples of such costimulatory molecules include CDS, ICAM-1, GITR, BAFFR, HVEM (LIGHTR), SLAMF7, NKp80 (KLRF1), NKp30, NKp44, NKp46, CD160, CD19, CD4, CD8alpha, CD8beta, IL2R beta, IL2R gamma, IL7R alpha, ITGA4, VLA1, CD49a, ITGA4, IA4, CD49D, ITGA6, VLA-6, CD49f, ITGAD, CD11d, ITGAE, CD103, ITGAL, CD11a, LFA-1, ITGAM, CD11b, ITGAX, CD11c, ITGB1, CD29, ITGB2, CD18, LFA-1, ITGB7, TNFR2, TRANCE/RANKL, DNAM1 (CD226), SLAMF4 (CD244, 2B4), CD84, CD96 (Tactile), CEACAM1, CRTAM, Ly9 (CD229), CD160 (BY55), PSGL1, CD100 (SEMA4D), CD69, SLAMF6 (NTB-A, Ly108), SLAM (SLAMF1, CD150, IPO-3), BLAME (SLAMF8), SELPLG (CD162), LTBR, LAT, GADS, SLP-76, NKG2D, NKG2C and PAG/Cbp.

[1148] The intracellular signaling sequences within the cytoplasmic portion of the CAR may be linked to each other in a random or specified order. Optionally, a short oligo- or polypeptide linker, for example, between 2 and 10 amino acids (e.g., 2, 3, 4, 5, 6, 7, 8, 9, or 10 amino acids) in length may form the linkage between intracellular signaling sequence. In one embodiment, a glycine-serine doublet can be used as a suitable linker. In one embodiment, a single amino acid, e.g., an alanine, a glycine, can be used as a suitable linker.

[1149] In one aspect, the intracellular signaling domain is designed to comprise two or more, e.g., 2, 3, 4, 5, or more, costimulatory signaling domains. In an embodiment, the two or more, e.g., 2, 3, 4, 5, or more, costimulatory signaling domains, are separated by a linker molecule, e.g., a linker molecule described herein. In one embodiment, the intracellular signaling domain comprises two costimulatory signaling domains. In some embodiments, the linker molecule is a glycine residue. In some embodiments, the linker is an alanine residue.

[1150] In one aspect, the intracellular signaling domain is designed to comprise the signaling domain of CD3-zeta and the signaling domain of CD28. In one aspect, the intracellular signaling domain is designed to comprise the signaling domain of CD3-zeta and the signaling domain of 4-1BB. In one aspect, the signaling domain of 4-1BB is a signaling domain of SEQ ID NO: 158. In one aspect, the signaling domain of CD3-zeta is a signaling domain of SEQ ID NO: 163.

[1151] In one aspect, the intracellular signaling domain is designed to comprise the signaling domain of CD3-zeta and the signaling domain of CD27. In one aspect, the signaling domain of CD27 comprises an amino acid sequence of QRRKYRSNKGESPVEPAEPCRYSCPREEEGSTIPIQEDYRKPEPACSP (SEQ ID NO: 161). In one aspect, the signalling domain of CD27 is encoded by a nucleic acid sequence of

(SEQ ID NO: 162)
AGGAGTAAGAGGAGCAGGCTCCTGCACAGTGACTACATGAACATGACT
CCCCGCCGCCCCGGGCCCACCCGCAAGCATTACCAGCCCTATGCCCCA
CCACGCGACTTCGCAGCCTATCGCTCC.

[1152] one aspect, the CAR-expressing cell described herein can further comprise a second CAR, e.g., a second CAR that includes a different antigen binding domain, e.g., to the same target or a different target (e.g., a target other than a cancer associated antigen described herein or a different cancer associated antigen described herein, e.g., CD19, CD33, CLL-1, CD34, FLT3, or folate receptor beta). In one embodiment, the second CAR includes an antigen binding domain to a target expressed the same cancer cell type as the cancer associated antigen. In one embodiment, the CAR-expressing cell comprises a first CAR that targets a first antigen and includes an intracellular signaling domain having a costimulatory signaling domain but not a primary signaling domain, and a second CAR that targets a second, different, antigen and includes an intracellular signaling domain having a primary signaling domain but not a costimulatory signaling domain. While not wishing to be bound by theory, placement of a costimulatory signaling domain, e.g., 4-1BB, CD28, ICOS, CD27 or OX-40, onto the first CAR, and the primary signaling domain, e.g., CD3 zeta, on the second CAR can limit the CAR activity to cells where both targets are expressed. In one embodiment, the CAR expressing cell comprises a first cancer associated antigen CAR that includes an antigen binding domain that binds a target antigen described herein, a transmembrane domain and a costimulatory domain and a second CAR that targets a different target antigen (e.g., an antigen expressed on that same cancer cell type as the first target antigen) and includes an antigen binding domain, a transmembrane domain and a primary signaling domain. In another embodiment, the CAR expressing cell comprises a first CAR that includes an antigen binding domain that binds a target antigen described herein, a transmembrane domain and a primary signaling domain and a second CAR that targets an antigen other than the first target antigen (e.g., an antigen expressed on the same cancer cell type as the first target antigen) and includes an antigen binding domain to the antigen, a transmembrane domain and a costimulatory signaling domain.

[1153] In another aspect, the disclosure features a population of CAR-expressing cells, e.g., CART cells. In some embodiments, the population of CAR-expressing cells comprises a mixture of cells expressing different CARs. For example, in one embodiment, the population of CART cells can include a first cell expressing a CAR having an antigen binding domain to a cancer associated antigen described herein, and a second cell expressing a CAR having a different antigen binding domain, e.g., an antigen binding domain to a different a cancer associated antigen described herein, e.g., an antigen binding domain to a cancer associated antigen described herein that differs from the cancer associate antigen bound by the antigen binding domain of the CAR expressed by the first cell. As another example, the population of CAR-expressing cells can include a first cell expressing a CAR that includes an antigen binding domain to a cancer associated antigen described herein, and a second cell expressing a CAR that includes an antigen binding domain to a target other than a cancer associate antigen as described herein. In one embodiment, the population of CAR-expressing cells includes, e.g., a first cell expressing a CAR that includes a primary intracellular signaling domain, and a second cell expressing a CAR that includes a secondary signaling domain.

[1154] In another aspect, the disclosure features a population of cells wherein at least one cell in the population expresses a CAR having an antigen binding domain to a cancer associated antigen described herein, and a second cell expressing another agent, e.g., an agent which enhances the activity of a CAR-expressing cell. For example, in one embodiment, the agent can be an agent which inhibits an inhibitory molecule. Inhibitory molecules, e.g., PD-1, can, in some embodiments, decrease the ability of a CAR-expressing cell to mount an immune effector response. Examples of inhibitory molecules include PD-1, PD-L1, CTLA4, TIM3, CEACAM (CEACAM-1, CEACAM-3, and/or CEACAM-5), LAG3, VISTA, BTLA, TIGIT, LAIR1, CD160, 2B4, CD80, CD86, B7-H3 (CD276), B7-H4 (VTCN1), HVEM (TNFRSF14 or CD270), KIR, A2aR, MHC class I, MHC class II, GAL9, adenosine, and TGF (e.g., TGFbeta). In one embodiment, the agent which inhibits an inhibitory molecule comprises a first polypeptide, e.g., an inhibitory molecule, associated with a second polypeptide that provides a positive signal to the cell, e.g., an intracellular signaling domain described herein. In one embodiment, the agent comprises a first polypeptide, e.g., of an inhibitory molecule such as PD-1, PD-L1, CTLA4, TIM3, CEACAM (CEACAM-1, CEACAM-3, and/or CEACAM-5), LAG3, VISTA, BTLA, TIGIT, LAIR1, CD160, 2B4 and TGF beta, or a fragment of any of these, and a second polypeptide which is an intracellular signaling domain described herein (e.g., comprising a costimulatory domain (e.g., 41BB, CD27, OX40 or CD28, e.g., as described herein) and/or a primary signaling domain (e.g., a CD3 zeta signaling domain described herein). In one embodiment, the agent comprises a first polypeptide of PD-1 or a fragment thereof, and a second polypeptide of an intracellular signaling domain described herein (e.g., a CD28 signaling domain described herein and/or a CD3 zeta signaling domain described herein).

### Regulatory Polypeptides of Interest

[1155] In some embodiments, the heterologous polypeptide of interest linked to a COF1/CRBN-, COF2/CRBN-, or COF3/CRBN-binding polypeptide and/or a degradation domain is a regulatory protein. Provided herein are regulatory polypeptides and regulatory polypeptide encoding sequences useful in genetic control circuits, cells, and methods for identifying, selecting or making a cell or cell line capable of producing high yields of a product, e.g., a recombinant or therapeutic polypeptide. In general, regulatory polypeptides regulate expression of the product, e.g., a recombinant or therapeutic polypeptide. In some embodiments, the regulatory polypeptide is a gene-editing polypeptide. In some embodiments, the regulatory polypeptide encoding sequence is under the transcriptional control of a control element which activates transcription of the regulatory polypeptide encoding sequence dependent on one or more conditions. In some embodiments, a regulatory polypeptide binds to the control element, e.g., promoter element, operably linked to the recombinant or therapeutic polypeptide encoding sequence. In some embodiments, binding of the regulatory polypeptide to a control element inhibits transcription of the operably linked recombinant or therapeutic polypeptide encoding sequence. In some embodiments, a regulatory polypeptide binds to a sequence encoding an untranslated region of the transcript of the recombinant or therapeutic polypeptide. In some embodiments, binding of the regulatory polypeptide to an untranslated region of the transcript of the recombinant or therapeutic polypeptide inhibits translation of the recombinant or therapeutic polypeptide encoding sequence. In some embodiments, a regulatory polypeptide binds to the coding sequence of the recombinant or therapeutic polypeptide encoding sequence. In some embodiments, binding of the regulatory polypeptide to the coding sequence of the recombinant or therapeutic polypeptide inhibits transcription, translation, or transcription and translation of the recombinant or therapeutic polypeptide encoding sequence.

[1156] It is contemplated that the present disclosure is not specific to a particular regulatory polypeptide. Exemplary regulatory polypeptides include but are not limited to: Cas9 molecules, TALE molecules, and zinc finger molecules. In some embodiments, the regulatory polypeptide is a Cas-related protein known in the art. In some embodiments, the regulatory polypeptide is a protein from a type I, II, or III CRISPR/Cas system (e.g. as described in K. S. Makarova et al., Nat. Rev. Microbiol. 9, 467 (2011); K. S. Makarova, N. V. Grishin, S. A. Shabalina, Y. I. Wolf, E. V. Koonin, Biol. Direct 1, 7 (2006); or K. S. Makarova, L. Aravind, Y. I. Wolf, E. V. Koonin, Biol. Direct 6, 38 (2011)).

[1157] In some embodiments, the regulatory polypeptide is a Cas9 molecule. Regulatory polypeptides that are Cas9 molecules require one or more (e.g., one, two, three, four or more) suitable gRNAs to inhibit expression of a recombinant or therapeutic polypeptide.

[1158] In some embodiments, the regulatory polypeptide is a TALE molecule.

[1159] In some embodiments, the regulatory polypeptide is a zinc finger molecule.

[1160] In some embodiments, the regulatory polypeptide is an endogenous regulator of the first control element, e.g., the first promoter element. In an embodiment, the endogenous gene encoding the regulatory polypeptide is inactive, e.g., has been knocked out or mutated to produce a loss of function.

### Cas9 Molecules and Other Components of the CRISPR/CAS System

[1161] In some embodiments, the heterologous polypeptide of interest linked to a COF1/CRBN-, COF2/CRBN-, or COF3/CRBN-binding polypeptide and/or a degradation domain is a Cas9 molecule, a Cas12 molecule, a Cas13 molecule, or another component of the CRISPR/CAS system (e.g., a ribonucleoprotein (RNP) molecule). For gene therapies using the CRISPR/CAS system, one important consideration is to limit side effects caused by the off-target activity of a Cas molecule (e.g., a Cas9 molecule). Fusing a degron, e.g., a COF1/CRBN-, COF2/CRBN-, or COF3/CRBN-binding polypeptide described herein, e.g., the HilD tag or CARB tag described herein, to a component of the CRISPR/CAS system (e.g., a Cas9 molecule or a RNP molecule) helps to generate a gene therapy where the activity of the CRISPR/CAS system can be regulated by a degradation compound described herein, e.g., in the event of side effects.

[1162] Cas9 molecules to be used in the genetic control circuits, cells, and methods of the present disclosure may comprise polypeptides originating in a variety of species. In addition, one or more domains from a Cas9 molecule in one species may be combined with one or more domains from a Cas9 molecule in another species, e.g., in a fusion protein. Additional Cas9 polypeptide comprising species include: Acidovorax avenae, Actinobacillus pleuropneumoniae, Actinobacillus succinogenes, Actinobacillus suis, Actinomyces sp., cycliphilus denitrificans, Aminomonas paucivorans, Bacillus cereus, Bacillus smithii, Bacillus thuringiensis, Bacteroides sp., Blastopirellula marina, Bradyrhizobium sp., Brevibacillus laterosporus, Campylobacter coli, Campylobacter jejuni, Campylobacter lari, Candidatus Puniceispirillum, Clostridium cellulolyticum, Clostridium perfringens, Corynebacterium accolens, Corynebacterium diphtheria, Corynebacterium matruchotii, Dinoroseobacter shibae, Eubacterium dolichum, gamma proteobacterium, Gluconacetobacter diazotrophicus, Haemophilus parainfluenzae, Haemophilus sputorum, Helicobacter canadensis, Helicobacter cinaedi, Helicobacter mustelae, Ilyobacter polytropus, Kingella kingae, Lactobacillus crispatus, Listeria ivanovii, Listeria monocytogenes, Listeriaceae bacterium, Methylocystis sp., Methylosinus trichosporium, Mobiluncus mulieris, Neisseria bacilliformis, Neisseria cinerea, Neisseria flavescens, Neisseria lactamica, Neisseria meningitidis, Neisseria sp., Neisseria wadsworthii, Nitrosomonas sp., Parvibaculum lavamentivorans, Pasteurella multocida, Phascolarctobacterium succinatutens, Ralstonia syzygii, Rhodopseudomonas palustris, Rhodovulum sp., Simonsiella muelleri, Sphingomonas sp., Sporolactobacillus vineae, Staphylococcus lugdunensis, Streptococcus sp., Subdoligranulum sp., Tistrella mobilis, Treponema sp., or Verminephrobacter eiseniae.

[1163] Cas12 molecules (e.g., Cas12a, Cas12b, and Cas12c) have been disclosed, e.g., in Chen et al., Science. 2018 Apr. 27; 360(6387):436-439 and Shmakov et al., Nat Rev Microbiol. 2017 March; 15(3):169-182, herein incorporated by reference in their entireties. CRISPR-Cas12a (Cpf1) proteins are RNA-guided enzymes that bind DNA and generate targeted, double-stranded DNA breaks. Like CRISPR-Cas9, Cas12 is also a useful tool in genome editing. Additional Cas molecules that are useful for gene editing include, but not limited to, Cas13, e.g., Cas13a, Cas13b, and Cas13c, as disclosed in, e.g., WO2017219027 and Shmakov et al., Nat Rev Microbiol. 2017 March; 15(3):169-182, herein incorporated by reference in their entireties. In some embodiments, the heterologous polypeptide of interest is Cas12. In some embodiments, the heterologous polypeptide of interest is Cas13.

### Cas9 Structure and Activity

[1164] Crystal structures are available for naturally occurring Cas9 polypeptides (Jinek et al., Science, 343(6176):1247997, 2014) and for S. pyogenes Cas9 with a guide RNA (e.g., a synthetic fusion of crRNA and tracrRNA) (Nishimasu et al., Cell, 156:935-949, 2014; and Anders et al., Nature, 2014, doi: 10.1038/nature13579).

[1165] In an embodiment, a Cas9 molecule or Cas9 polypeptide comprises one or more of the following domains: a RuvC-like domain and an HNH-like domain. In an embodiment, a Cas9 molecule or Cas9 polypeptide is a dCas9 molecule or dCas9 polypeptide and the dCas9 molecule or dCas9 polypeptide comprises a RuvC-like domain, e.g., a RuvC-like domain that lacks nuclease activity, and/or an HNH-like domain, e.g., an HNH-like domain that lacks nuclease activity.

[1166] In an embodiment, the Cas9 molecule or Cas9 polypeptide can include more than one RuvC-like domain (e.g., one, two, three or more RuvC-like domains). In an embodiment, a RuvC-like domain comprises one or more mutations that alter its activity, such that the RuvC domain does not cleave DNA or has reduced DNA cleaving activity. In an embodiment, a RuvC-like domain is at least 5, 6, 7, 8 amino acids in length but not more than 20, 19, 18, 17, 16 or 15 amino acids in length. In an embodiment, the Cas9 molecule or Cas9 polypeptide comprises an N-terminal RuvC-like domain of about 10 to 20 amino acids, e.g., about 15 amino acids in length.

[1167] In an embodiment, the Cas9 molecule or Cas9 polypeptide can include more than one HNH-like domain (e.g., one, two, three or more HNH-like domains). In an embodiment, an HNH-like domain comprises one or more mutations that alter its activity, such that the HNH-like domain does not cleave DNA or has reduced DNA cleaving activity. In an embodiment, an HNH-like domain is at least 15, 20, 25 amino acids in length but not more than 40, 35 or 30 amino acids in length, e.g., 20 to 35 amino acids in length, e.g., 25 to 30 amino acids in length.

[1168] In embodiments, Cas9 molecules or Cas9 polypeptides have the ability to interact with a gRNA molecule, and in conjunction with the gRNA molecule localize to a core target domain, but are incapable of cleaving the target nucleic acid, or incapable of cleaving at efficient rates. Cas9 molecules having no, or no substantial, cleavage activity are referred to herein as dCas9 molecules or dCas9 polypeptides. For example, a dCas9 molecule or dCas9 polypeptide can lack cleavage activity or have substantially less, e.g., less than 20, 10, 5, 1 or 0.1% of the cleavage activity of a reference Cas9 molecule or Cas9 polypeptide, as measured by assays known in the art or assays described herein.

### Targeting and PAMs

[1169] A Cas9 molecule or Cas9 polypeptide is a polypeptide that can interact with a guide RNA (gRNA) molecule and, in concert with the gRNA molecule, localizes to a site which comprises a target domain and PAM sequence.

[1170] In an embodiment, the ability of a Cas9 molecule or Cas9 polypeptide to interact with a target nucleic acid is PAM sequence dependent. A PAM sequence is a sequence in the target nucleic acid. Cas9 molecules from different bacterial species can recognize different sequence motifs (e.g., PAM sequences). Cas9 molecules can be engineered to alter the PAM specificity of the Cas9 molecule. Exemplary naturally occurring Cas9 molecules are described in Chylinski et al., RNA BIOLOGY 2013 10:5, 727-737.

### Alterations in Cas9 Structure

[1171] In some embodiments, one or more mutation(s) can be present, e.g., in one or more RuvC-like domain, e.g., an N-terminal RuvC-like domain; an HNH-like domain; a region outside the RuvC-like domains and the HNH-like domain, of the Cas9 molecule or Cas9 polypeptide. In some embodiments, a mutation(s) is present in a RuvC-like domain, e.g., an N-terminal RuvC-like domain. In some embodiments, a mutation(s) is present in an HNH-like domain. In some embodiments, mutations are present in both a RuvC-like domain, e.g., an N-terminal RuvC-like domain and an HNH-like domain.

[1172] In an embodiment, a Cas9 molecule or Cas9 polypeptide, e.g., an dCas9 molecule or dCas9 polypeptide, comprises an amino acid sequence:
[1173] having 60%, 65%, 70%, 75%, 80%, 85%, 90%, 95%, 96%, 97%, 98% or 99% homology with;
[1174] differs at no more than, 2, 5, 10, 15, 20, 30, or 40% of the amino acid residues when compared with;
[1175] differs by at least 1, 2, 5, 10 or 20 amino acids, but by no more than 100, 80, 70, 60, 50, 40 or 30 amino acids from; or
[1176] is identical to any Cas9 molecule sequence described herein, or a naturally occurring Cas9 molecule sequence, e.g., a Cas9 molecule from a species listed herein or described in Chylinski et al., RNA BIOLOGY 2013 10:5, 727-737; Hou et al., PNAS Early Edition 2013, 1-6. In an embodiment, the Cas9 molecule or Cas9 polypeptide comprises one or more of the following activities: a helicase activity; or the ability, together with a gRNA molecule, to localize to a target nucleic acid. In an embodiment, the Cas9 molecule or Cas9 polypeptide does not comprise a nickase activity or a double stranded cleavage activity (e.g., an endonuclease and/or exonuclease activity).

[1177] Exemplary mutations that may be made in the RuvC domain or HNH domain with reference to the S. pyogenes sequence include: D10A, E762A, H840A, N854A, N863A and/or D986A.

[1178] Exemplary Cas9 polypeptide and Cas9 domain sequences can be found in Tables 50-54 of WO2015/157070.

dCas9 Polypeptides

[1179] In an embodiment, the heterologous polypeptide of interest linked to a COF1/CRBN-, COF2/CRBN-, or COF3/CRBN-binding polypeptide and/or a degradation domain is a dCas9 molecule, e.g., a dCas9 polypeptide comprising one or more differences in a RuvC domain and/or in an HNH domain as compared to a reference Cas9 molecule, and the dCas9 molecule or dCas9 polypeptide does not cleave a nucleic acid, or cleaves with significantly less efficiency than does wildtype, e.g., when compared with wild type in a cleavage assay, e.g., as described herein, cuts with less than 50, 25, 10, or 1% of a reference Cas9 molecule, as measured by an assay described herein.

[1180] Mutating key residues in both DNA cleavage domains of the Cas9 protein (e.g. the D10A and H840A mutations) results in the generation of a catalytically inactive Cas9 (dCas9 which is also known as dead Cas9) molecule. An enzymatically inactive Cas9, e.g., dCas9, complexes with a gRNA and localizes to the DNA sequence specified by that gRNA's targeting domain; however, it does not cleave the target DNA. An enzymatically inactive (e.g., dCas9) Cas9 molecule can block transcription when recruited to early regions in the coding sequence. Additional repression can be achieved by fusing a transcriptional repression domain (for example KRAB, SID or ERD) to the enzymatically inactive Cas9, e.g., dCas9, and recruiting it to the target sequence, e.g., within 1000 bp of sequence 3′ of the start codon or within 500 bp of a control element, e.g., promoter element, e.g., 5′ of the start codon of a gene. Targeting DNase I hypersensitive sites (DHSs) of the promoter (e.g., by making gRNAs complementary to the DHSs) may be an additional strategy for gene repression, e.g., inhibition of a recombinant or therapeutic polypeptide encoding sequence, because these regions are more likely to be accessible to the enzymatically inactive Cas9, e.g., dCas9, and are also likely to harbor sites for endogenous transcription factors. While not wishing to be bound by theory, it is contemplated herein that blocking the binding site of an endogenous transcription factor or RNA polymerase would aid in down-regulating gene expression, e.g., expression of a recombinant or therapeutic polypeptide encoding sequence. In an embodiment, one or more enzymatically inactive Cas9, e.g., dCas9, molecules may be used to block binding of one or more endogenous transcription factors. In another embodiment, an enzymatically inactive Cas9, e.g., dCas9, molecule can be fused to an effector domain, e.g., a repression domain, an activation domain, a methylation enzyme, etc. Fusion of the enzymatically inactive Cas9, e.g., dCas9, to an effector domain enables recruitment of the effector to any DNA site specified by the gRNA. Altering chromatin status can result in decreased expression of the target gene. One or more enzymatically inactive Cas9, e.g., dCas9, molecules fused to one or more chromatin modifying proteins may be used to alter chromatin status.

[1181] In an embodiment, a gRNA molecule can be targeted to a control element (e.g., promoter element), e.g., the control element operably linked to a recombinant or therapeutic polypeptide encoding sequence. In an embodiment a gRNA molecule can be targeted to a sequence encoding a recombinant or therapeutic polypeptide.

### TALE Molecules

[1182] In some embodiments, the heterologous polypeptide of interest linked to a COF1/CRBN-, COF2/CRBN-, or COF3/CRBN-binding polypeptide and/or a degradation domain is a transcription activator-like effector (TALE) molecule or TALE polypeptide. A molecule or TALE polypeptide, as that term is used herein, refers to a molecule or polypeptide comprising multiple TALE DNA-binding repeat domains (TALE DBDs) that can home or localize to a nucleic acid position specified by the TALE DBDs. TALE molecule and TALE polypeptide, as those terms are used herein, refer to naturally occurring TALE molecules and to engineered, altered, or modified TALE molecules or TALE polypeptides that differ, e.g., by at least one amino acid residue, from a reference sequence, e.g., the most similar naturally occurring TALE molecule known in the art.

[1183] TALE DBD, as that term is used herein, refers to a 33-35 amino acid motif, including two hypervariable residues (i.e. a repeat variable di-residue, RVD) at positions 12 and 13 of the motif. The RVD of a TALE DNA-binding domain (DBD) specifies the DNA base-pair or base-pairs to which a TALE DBD has binding affinity. When TALE DBDs are combined in arrays within a TALE molecule or TALE polypeptide, the order of TALE DBDs (and their RVD) determine the DNA sequence to which a TALE molecule or TALE polypeptide has binding affinity. Naturally occurring TALE polypeptides and TALE DBDs are produced by Xanthomonas bacteria.

[1184] Repeat variable di-residue (RVD), as that term is used herein, refers to the two hypervariable amino acid residues at positions 12 and 13 of a TALE DBD. The RVD determines the DNA base-pair affinity of a TALE DBD. All possible combinations of RVDs and their respective base-pair affinities are known in the art. See, e.g., Cong L., et al. Nat Commun. 2012 Jul. 24; (3):968; Juillerat A., et al. Sci Rep. 2015 Jan. 30; 5( ):8150; Miller J. C. et al. Nat Methods 12, 465-471 (2015); Streubel J., et al. Nat Biotechnol 30, 593-595 (2012); and Yang J. et al. Cell Res 24, 628-631 (2014), incorporated herein by reference in their entireties. All possible RVDs are contemplated for use with the repressor polypeptides, e.g., TALE molecules, described herein.

[1185] TALE DBD array, as that term is used herein, refers to the identities and order of TALE DBDs, e.g., the RVDs of each TALE DBD, within a TALE molecule or TALE polypeptide. The TALE DBD array determines the sequence specific binding affinity of a TALE molecule or TALE polypeptide.

[1186] In some embodiments, the repressor polypeptide is a TALE molecule or TALE polypeptide. TALE DBDs and TALE polypeptide from any species of Xanthomonas can be used in the genetic control circuits, cells, and methods for identifying, selecting, or making a cell or cell line capable of producing high yields of a product, e.g., a recombinant or therapeutic polypeptide, described herein. In some embodiments, the repressor polypeptide is a naturally occurring TALE molecule or TALE polypeptide. In some embodiments, the repressor polypeptide is an engineered TALE molecule or TALE polypeptide, i.e. a TALE molecule or TALE polypeptide that differs by one or more amino acids from a naturally occurring TALE molecule or TALE polypeptide or from another engineered TALE molecule or TALE polypeptide known in the art.

[1187] In some embodiments, an engineered TALE molecule or TALE polypeptide comprises an amino acid sequence:
[1188] having 60%, 65%, 70%, 75%, 80%, 85%, 90%, 95%, 96%, 97%, 98% or 99% homology with;
[1189] differs at no more than, 2, 5, 10, 15, 20, 30, or 40% of the amino acid residues when compared with;
[1190] differs by at least 1, 2, 5, 10 or 20 amino acids, but by no more than 100, 80, 70, 60, 50, 40 or 30 amino acids from; or
[1191] is identical to any TALE molecule sequence described herein, or a naturally occurring TALE molecule sequence, e.g., a TALE molecule from a species listed herein or described in a publication referenced herein.

[1192] In some embodiments, a TALE molecule localizes to the target DNA sequence specified by that TALE molecules' TALE DBD array. In some embodiments, TALE molecule can block transcription when recruited to early regions in a coding sequence, e.g., the coding sequence of a recombinant or therapeutic polypeptide. In some embodiments, a TALE molecule can block transcription when recruited to a control element, e.g., a promoter element, operably linked to a recombinant or therapeutic polypeptide encoding sequence. In some embodiments, additional repression can be achieved by fusing a transcriptional repression domain (for example KRAB, SID or ERD) to the TALE molecule, enabling recruitment of the effector to any DNA site specified by the TALE DBD array.

[1193] In some embodiments, a TALE molecule comprises two or more (e.g. 2, 3, 4, 5, 6, 7, 8, 9, 10, 11, 12, 13, 14, 15, 16, 17, 18, 19, 20, 21, 22, 23, 24, 25, 26, 27, 28, 29, 30, 31, 32, 33, 34, 35, 36, 37, 38, 39, 40, 41, 42, 43, 44, 45, 46, 47, 48, 49, 50, or more) TALE DBDs.

[1194] In some embodiments, the TALE DBD array of a repressor polypeptide, e.g., TALE molecule, specifies a target DNA sequence. In some embodiments, the target sequence specified by the TALE DBD array is comprised within a control element, e.g., promoter element, operably linked to a recombinant or therapeutic polypeptide encoding sequence. In some embodiments, the target sequence specified by the TALE DBD array is comprised with a recombinant or therapeutic polypeptide encoding sequence.

[1195] Exemplary naturally occurring and engineered TALE polypeptide sequences and methods for design and testing of TALE polypeptides for use with genetic control circuits, cells, and methods for identifying, selecting, or making a cell or cell line capable of producing high yields of a product, e.g., a recombinant or therapeutic polypeptide, described herein can be found in the art, e.g., in Zhang F, et al. Nat Biotechnol. 2011; 29:149-153; Geissler R, et al. PLoS One. 2011; 6:e19509; Garg A, et al. Nucleic Acids Res. 2012; Bultmann S, et al. Nucleic Acids Res. 2012; 40:5368-5377; Cermak T, et al. Efficient design and assembly of custom TALEN and other TAL effector-based constructs for DNA targeting. Nucleic Acids Res. 2011; 39:e82; Cong L, et al. Nat Commun. 2012; 3:968; and Miller J C, et al. Nat Biotechnol. 2011; 29:143-148, herein incorporated by reference in their entireties.

### Zinc Finger Molecules

[1196] In some embodiments, the heterologous polypeptide of interest linked to a COF1/CRBN-, COF2/CRBN-, or COF3/CRBN-binding polypeptide and/or a degradation domain is a zinc finger molecule. A zinc finger molecule, as that term is used herein, refers to a molecule or polypeptide comprising multiple zinc finger domains (ZFDs). A zinc finger molecule has affinity to a specific DNA sequence determined by the identity and order of the ZFDs the zinc finger molecule comprises.

[1197] A zinc finger domain (ZFD), as that term is used herein, refers to any of a family of polypeptides that bind DNA in a sequence specific manner and require a zinc ion ligand to bind DNA. Many families of ZFDs have been studied and characterized (see, e.g., Krishna, S S., et al. Nucl. Acids Res. (2003) 31 (2): 532-550). The disclosure contemplates zinc finger molecules that may comprise ZFDs of any type or origin known to those of skill in the art. Without intending to be limited to any particular type of ZFD, the disclosure contemplates zinc finger molecules comprising Cys₂His₂ ZFDs, which are the most prevalent and well-studied ZFDs in the art. Cys₂His₂ ZFDs comprise two beta strands that form an anti-parallel beta sheet and an alpha helix. Positions −1, 1, 2, 3, 5, and 6 of the alpha helix are known to specify DNA sequence specific binding by interacting with DNA base pairs. In an embodiment, a Cys₂His₂ ZFD may have specific binding affinity for a 3 base pair target sequence. In an embodiment, a Cys₂His₂ ZFD may specifically interact with an additional base pair adjacent to the target sequence in a context specific manner, i.e. dependent upon the presence and identity of adjacent ZFDs within a zinc finger molecule.

[1198] A zinc finger domain array, or ZFD array, as that term is used herein, refers to the identities and order of ZFDs, within a zinc finger molecule or zinc finger polypeptide. The ZFD array determines the sequence specific binding affinity of a zinc finger molecule or zinc finger polypeptide.

[1199] In some embodiments, the repressor polypeptide is a zinc finger molecule or zinc finger polypeptide. ZFDs and zinc finger polypeptides from any species (e.g., a mammalian species, e.g., humans) can be used in the genetic control circuits, cells, and methods for identifying, selecting, or making a cell or cell line capable of producing high yields of a product, e.g., a recombinant or therapeutic polypeptide, described herein. In some embodiments, the repressor polypeptide is a naturally occurring zinc finger molecule or zinc finger polypeptide. In some embodiments, the repressor polypeptide is an engineered zinc finger molecule or zinc finger polypeptide, i.e. a zinc finger molecule or zinc finger polypeptide that differs by one or more amino acids from a naturally occurring zinc finger molecule or zinc finger polypeptide or from another engineered zinc finger molecule or zinc finger polypeptide known in the art.

[1200] In some embodiments, an engineered zinc finger molecule or zinc finger polypeptide comprises an amino acid sequence:
[1201] having 60%, 65%, 70%, 75%, 80%, 85%, 90%, 95%, 96%, 97%, 98% or 99% homology with;
[1202] differs at no more than, 2, 5, 10, 15, 20, 30, or 40% of the amino acid residues when compared with;
[1203] differs by at least 1, 2, 5, 10 or 20 amino acids, but by no more than 100, 80, 70, 60, 50, 40 or 30 amino acids from; or
[1204] is identical to any zinc finger molecule sequence described herein, or a naturally occurring zinc finger molecule sequence, e.g., a zinc finger molecule from a species listed herein or described in a publication referenced herein.

[1205] In some embodiments, a zinc finger molecule localizes to the target DNA sequence specified by that zinc finger molecules' ZFD array. In some embodiments, a zinc finger molecule can block transcription when recruited to early regions in a coding sequence, e.g., the coding sequence of a recombinant or therapeutic polypeptide. In some embodiments, a zinc finger molecule can block transcription when recruited to a control element, e.g., a promoter element, operably linked to a recombinant or therapeutic polypeptide encoding sequence. In some embodiments, additional repression can be achieved by fusing a transcriptional repression domain (for example KRAB, SID or ERD) to the zinc finger molecule, enabling recruitment of the effector to any DNA site specified by the ZFD array.

[1206] In some embodiments, a zinc finger molecule comprises two or more (e.g. 2, 3, 4, 5, 6, 7, 8, 9, 10, 11, 12, 13, 14, 15, 16, 17, 18, 19, 20, 21, 22, 23, 24, 25, 26, 27, 28, 29, 30, 31, 32, 33, 34, 35, 36, 37, 38, 39, 40, 41, 42, 43, 44, 45, 46, 47, 48, 49, 50, or more) ZFDs. In some embodiments, a ZFD array can be constructed from ZFDs with known target sequence affinities to create a zinc finger molecule or zinc finger polypeptide with a desired specific target sequence.

[1207] In some embodiments, the ZFD array of a repressor polypeptide, e.g., zinc finger molecule, specifies a target DNA sequence. In some embodiments, the target sequence specified by the ZFD array is comprised within a control element, e.g., promoter element, operably linked to a recombinant or therapeutic polypeptide encoding sequence. In some embodiments, the target sequence specified by the ZFD array is comprised with a recombinant or therapeutic polypeptide encoding sequence.

[1208] Exemplary naturally occurring and engineered zinc finger polypeptide sequences and methods for design and testing of zinc finger polypeptides for use with genetic control circuits, cells, and methods for identifying, selecting, or making a cell or cell line capable of producing high yields of a product, e.g., a recombinant or therapeutic polypeptide, described herein can be found in the art, e.g., in Wolfe S A, et al. Annu Rev Biophys Biomol Struct. 2000; 29:183-212; Pabo C O, et al. Annu Rev Biochem. 2001; 70:313-340; Greisman H A, Pabo C O. Science. 1997; 275:657-661; Isalan M, et al., Proc Natl Acad Sci USA. 1997; 94:5617-5621; Wolfe S A, et al. J Mol Biol. 1999; 285:1917-1934, herein incorporated by reference in their entireties.

[1209] Methods of designing ZFDs and ZFD arrays to bind specific target DNA sequences can be found in the art, e.g., in Maeder M L, et al. Mol Cell. 2008; 31:294-301; Sander J D, et al., Nat Methods. 2011; 8:67-69; and Meng X, et al. Nat Biotechnol. 2008; 26:695-701, herein incorporated by reference in their entireties.

### Degradation Domains

[1210] In some embodiments, the fusion polypeptide of this invention further comprises a degradation domain. In some embodiments, the degradation domain has a first state and a second state, e.g., states of stabilization/destabilization, or states of folding/misfolding. The first state is associated with, causes, or mediates expression of the fusion polypeptide at a first rate or level and the second state is associated with, causes, or mediates expression of the fusion polypeptide at a second rate or level. In some embodiments, the second state has a level or rate that is greater, e.g., 2, 3, 4, 5, 6, 7, 8, 9, 10, 20, or 30 fold greater, than the rate or level of the first state. In some embodiments, the second state is associated with, maintained by, or caused by the presence of a stabilization compound. In some embodiments, the presence of the stabilization compound can be associated with, cause, or mediate the transformation of a first folding state to a second folding state, e.g., from misfolded to more properly folded state, e.g., a first state susceptible to degradation to a second state less susceptible to degradation than the first state; or from a first folding state that has a first level of degradation to a second folding state what has a second, lessor, level of degradation, e.g., in a cell of interest.

[1211] In an embodiment, addition of a stabilization compound to a plurality of cells, e.g., host cells or cells comprising fusion polypeptides described herein, causes a transformation of a sub-plurality of cells from the first state to the second state, e.g., states of stabilization/destabilization, or states of folding/misfolding as described herein. In an embodiment, in the absence of the stabilization compound, less than 10, 9, 8, 7, 6, 5, 4, 3, 2, or 1% of the cells in the plurality comprise the second state, and greater than or equal to 90, 91, 92, 93, 94, 95, 96, 97, 98, or 99% of the cells in the plurality comprise the first state. In an embodiment, in the presence of the stabilization compound, greater than or equal to 20, 30, 40, 50, 60, 70, 80, 90, or 95% of the cells in the plurality comprise the second state, and less than 20, 15, 10, 9, 8, 7, 6, 5, 4, 3, 2, or 1% of the cells in the plurality comprise the first state. Determination of the percentages of cells in a plurality comprising a state can be made using methods described throughout the specification.

[1212] In one embodiment, the degradation domain is separated from the rest of the fusion polypeptide by a heterologous protease cleavage site.

[1213] Without wishing to be bound by theory, in some embodiments, the degradation domain is unstable and/or unable to fold into a stable conformation in the absence of a stabilization compound. This misfolded/unfolded degradation domain can be degraded by intracellular degradation pathway along with the rest of the fusion polypeptide. In the presence of the stabilization compound, the degradation domain assumes a proper conformation and is less susceptible to intercellular degradation pathways. Thus, the expression level of the fusion polypeptide can be regulated by the presence or absence of the stabilization compound.

[1214] In some embodiments, the proper folding of the degradation domain exposes the heterologous protease cleavage site, leading to the cleavage of the heterologous protease cleavage site and the removal of the degradation domain from the rest of the fusion polypeptide.

[1215] Methods of generating degradation domains that are selectively stable in the presence of a stabilization compound are well known in the art and discussed further below. Several such domain-stabilization compound pairs have been generated to date and are featured in the present invention. These include degradation domains based on FKBP (e.g., using a “Shield” stabilization compound) as described in: A Rapid, Reversible, and Tunable Method to Regulate Protein Function in Living Cells Using Synthetic Small Molecules.” Banaszynski, L. A.; Chen, L.-C.; Maynard-Smith, L. A.; Ooi, A. G. L.; Wandless, T. J. Cell, 2006, 126, 995-1004; domains based on DHFR (e.g., using trimethoprim as a stabilization compound) as described in A general chemical method to regulate protein stability in the mammalian central nervous system. Iwamoto, M.; Björklund, T.; Lundberg, C.; Kirik, D.; Wandless, T. J. Chemistry & Biology, 2010, 17, 981-988; and domains based on estrogen receptor alpha (e.g., where 40HT is used as a stabilization compound) as described in Destabilizing domains derived from the human estrogen receptor Y Miyazaki, H Imoto, L-c Chen, T J Wandless J. Am. Chem. Soc. 2012, 134, 3942-3945. Each of these references is incorporated by reference in its entirety.

[1216] The present disclosure encompasses degradation domains derived from any naturally occurring protein. Preferably, fusion polypeptides of the invention will include a degradation domain for which there is no ligand natively expressed in the cell compartments of interest. For example, if the fusion polypeptide is designed for expression in T cells, it is preferable to select a degradation domain for which there is no naturally occurring ligand present in T cells. Thus, the degradation domain, when expressed in the cell of interest, will only be stabilized in the presence of an exogenously added compound. Notably, this property can be engineered by either engineering the degradation domain to no longer bind a natively expressed ligand (in which case the degradation domain will only be stable in the presence of a synthetic compound) or by expressing the degradation domain in a compartment where the natively expressed ligand does not occur (e.g., the degradation domain can be derived from a species other than the species in which the fusion polypeptide will be expressed).

[1217] Degradation domain-stabilization compound pairs can be derived from any naturally occurring or synthetically developed protein. Stabilization compounds can be any naturally occurring or synthetic compounds. In certain embodiments, the stabilization compounds will be existing prescription or over-the-counter medicines. Examples of proteins that can be engineered to possess the properties of a degradation domain are set forth in Table 21 below along with a corresponding stabilization compound.

[1218] In some embodiments, the degradation domain is derived from a protein listed in Table 21.

[1219] In some embodiments, the degradation domain is derived from an estrogen receptor (ER). In some embodiments, the degradation domain comprises an amino acid sequence selected from SEQ ID NO: 46 or a sequence having at least 90%, 95%, 97%, 98%, or 99% identity thereto, or SEQ ID NO: 48 or a sequence having at least 90%, 95%, 97%, 98%, or 99% identity thereto. In some embodiments, the degradation domain comprises the amino acid sequence of SEQ ID NO: 46 or 48. When the degradation domain is derived from an estrogen receptor, the stabilization compound can be selected from Bazedoxifene or 4-hydroxy tamoxifen (4-OHT). In some embodiments, the stabilization compound is Bazedoxifene. Tamoxifen and Bazedoxifene are FDA approved drugs, and thus are safe to use in human.

[1220] In some embodiments, the degradation domain is derived from an FKB protein (FKBP). In some embodiments, the degradation domain comprises the amino acid sequence of SEQ ID NO: 50 or a sequence having at least 90%, 95%, 97%, 98%, or 99% identity thereto. In some embodiments, the degradation domain comprises the amino acid sequence of SEQ ID NO: 50. When the degradation domain is derived from a FKBP, the stabilization compound can be Shield-1.

[1221] In some embodiments, the degradation domain is derived from dihydrofolate reductase (DHFR). In some embodiments, the degradation domain comprises the amino acid sequence of SEQ ID NO: 51 or a sequence having at least 90%, 95%, 97%, 98%, or 99% identity thereto. In some embodiments, the degradation domain comprises the amino acid sequence of SEQ ID NO: 51. When the degradation domain is derived from a DHFR, the stabilization compound can be Trimethoprim.

[1222] In some embodiments, the degradation domain is not derived from an FKB protein, estrogen receptor, or DHFR.

TABLE 21
Exemplary proteins for generating degradation domains

| | | |
|---|---|---|
| Type | Activity of drug | Drug examples |

Oxidoreductases

| | | |
|---|---|---|
| Aldehyde dehydrogenase | Inhibitor | Disulfiram |
| Monoamine oxidases (MAOs) | MAO-A inhibitor | Tranylcypromine, moclobemide |
| | MAO-B inhibitor | Tranylcypromine |
| Cyclooxygenases (COXs) | COX1 inhibitor | Acetylsalicylic acid, profens, |
| | | acetaminophen and dipyrone (as |
| | | arachidonylamides) |
| | COX2 inhibitor | Acetylsalicylic acid, profens, |
| | | acetaminophen and dipyrone (as |
| | | arachidonylamides) |
| Vitamin K epoxide reductase | Inhibitor | Warfarin, phenprocoumon |
| Aromatase | Inhibitor | Exemestane |
| Lanosterol demethylase | Inhibitor | Azole antifungals |
| (fungal) | | |
| Lipoxygenases | Inhibitor | Mesalazine |
| | 5-lipoxygenase inhibitor | Zileuton |
| Thyroidal peroxidase | Inhibitor | Thiouracils |
| Iodothyronine-5′ deiodinase | Inhibitor | Propylthiouracil |
| Inosine monophosphate | Inhibitor | Mycophenolate mofetil |
| dehydrogenase | | |
| HMG-CoA reductase | Inhibitor | Statins |
| (α-5-Testosterone reductase | Inhibitor | Finasteride, dutasteride |
| Dihydrofolate reductase | Inhibitor | Trimethoprim |
| (bacterial) | | |
| Dihydrofolate reductase | Inhibitor | Methotrexate, pemetrexed |
| (human) | | |
| Dihydrofolate reductase | Inhibitor | Proguanil |
| (parasitic) | | |
| Dihydroorotate reductase | Inhibitor | Leflunomide |
| Enoyl reductase | Inhibitor | Isoniazid |
| (mycobacterial) | | |
| Squalene epoxidase (fungal) | Inhibitor | Terbinafin |
| Δ-14 reductase (fungal) | Inhibitor | Amorolfin |
| Xanthine oxidase | Inhibitor | Allopurinol |
| 4-Hydroxyphenylpyruvate | Inhibitor | Nitisinone |
| dioxygenase | | |
| Ribonucleoside diphosphate | Inhibitor | Hydroxycarbamide |
| reductase | | |

Transferases

| | | |
|---|---|---|
| Protein kinase C | Inhibitor | Miltefosine |
| Bacterial peptidyl transferase | Inhibitor | Chloramphenicol |
| Catecholamine-O- | Inhibitor | Entacapone |
| methyltransferase | | |
| RNA polymerase (bacterial) | Inhibitor | Ansamycins |
| Reverse transcriptases (viral) | Competitive inhibitors | Zidovudine |
| | Allosteric inhibitors | Efavirenz |
| DNA polymerases | Inhibitor | Acyclovir, suramin |
| GABA transaminase | Inhibitor | Valproic acid, vigabatrin |
| Tyrosine kinases | PDGFR/ABL/KIT inhibitor | Imatinib |
| | EGFR inhibitor | Erlotinib |
| | β-VEGFR2/PDGFR/KIT/FLT3 | Sunitinib |
| | β-VEGFR2/PDGFR/RAF | Sorafenib |
| Glycinamide ribonucleotide | Inhibitor | Pemetrexed |
| formyl transferase | | |
| Phosphoenolpyruvate | Inhibitor | Fosfomycin |
| transferase (MurA, bacterial) | | |
| Human cytosolic branched- | Inhibitor | Gabapentin |
| chain aminotransferase | | |
| (hBCATc) | | |

Hydrolases (proteases)

| | | |
|---|---|---|
| Aspartyl proteases (viral) | HIV protease inhibitor | Saquinavir, indinavir |

Hydrolases (serine proteases)

| | | |
|---|---|---|
| Unspecific | Unspecific inhibitors | Aprotinine |
| Bacterial serine protease | Direct inhibitor | β-lactams |
| Bacterial serine protease | Indirect inhibitor | Glycopeptides |
| Bacterial lactamases | Direct inhibitor | Sulbactam |
| Human antithrombin | Activator | Heparins |
| Human plasminogen | Activator | Streptokinase |
| Human coagulation factor | Activator | Factor IX complex, Factor VIII |
| Human factor Xa | Inhibitor | Fondaparinux |

Hydrolases (metalloproteases)

| | | |
|---|---|---|
| Human ACE | Inhibitor | Captopril |
| Human HRD | Inhibitor | Cilastatin |
| Human carboxypeptidase A | Inhibitor | Penicillamine |
| (Zn) | | |
| Human enkephalinase | Inhibitor | Racecadotril |

Hydrolases (other)

| | | |
|---|---|---|
| 26S proteasome | Inhibitor | Bortezomib |
| Esterases | AChE inhibitor | Physostigmine |
| | AChE reactivators | Obidoxime |
| | PDE inhibitor | Caffeine |
| | PDE3 inhibitor | Amrinon, milrinone |
| | PDE4 inhibitor | Papaverine |
| | PDE5 inhibitor | Sildenafil |
| | HDAC inhibitor | Valproic acid |
| | HDAC3/HDAC7 inhibitor | Carbamezepine |
| Glycosidases (viral) | α-glycosidase inhibitor | Zanamivir, oseltamivir |
| Glycosidases (human) | α-glycosidase inhibitor | Acarbose |
| Lipases | Gastrointestinal lipases inhibitor | Orlistat |
| Phosphatases | Calcineurin inhibitor | Cyclosporin |
| | Inositol polyphosphate | Lithium ions |
| | phosphatase inhibitor | |
| GTPases | Rac1 inhibitor | 6-Thio-GTP (azathioprine |
| | | metabolite) |
| Phosphorylases | Bacterial C55-lipid phosphate | Bacitracin |
| | dephosphorylase inhibitor | |

Lyases

| | | |
|---|---|---|
| DOPA decarboxylase | Inhibitor | Carbidopa |
| Carbonic anhydrase | Inhibitor | Acetazolamide |
| Histidine decarboxylase | Inhibitor | Tritoqualine |
| Ornithine decarboxylase | Inhibitor | Eflornithine |
| Soluble guanylyl cyclase | Activator | Nitric acid esters, molsidomine |

Isomerases

| | | |
|---|---|---|
| Alanine racemase | Inhibitor | D-Cycloserine |
| DNA gyrases (bacterial) | Inhibitor | Fluoroquinolones |
| Topoisomerases | Topoisomerase I inhibitor | Irinotecan |
| | Topoisomerase II inhibitor | Etoposide |
| 8,7 isomerase (fungal) | Inhibitor | Amorolfin |

Ligases (also known as synthases)

| Dihydropteroate synthase | Inhibitor | Sulphonamides |
|---|---|---|
| Thymidylate synthase (fungal | Inhibitor | Fluorouracil |
| and human) | | |
| Thymidylate synthase (human) | Inhibitor | Methotrexate, pemetrexed |
| Phosphofructokinase | Inhibitor | Antimony compounds |
| mTOR | Inhibitor | Rapamycin |
| Haem polymerase | Inhibitor | Quinoline antimalarials |
| (Plasmodium) | | |
| β-1,3-D-glucansynthase | Inhibitor | Caspofungin |
| (fungi) | | |
| Glucosylceramide synthase | Inhibitor | Miglustat |
| Substrate | Drug substance | |
| Asparagine | Asparaginase | |
| Urate | Rasburicase (a urate oxidase) | |
| VAMP-synaptobrevin, | Light chain of the botulinum | |
| SNAP25, Syntaxin | neurotoxin (Zn-endopeptidase) | |
| Type | Activity of drug | Drug examples |

Direct ligand-gated ion channel receptors

| | | |
|---|---|---|
| GABA_{A} receptors | Barbiturate binding site agonists | Barbiturate |
| | Benzodiazepine binding site | Benzodiazepines |
| | agonists | |
| | Benzodiazepine binding site | Flumazenil |
| | antagonists | |
| Acetylcholine receptors | Nicotinic receptor agonists | Pyrantel (of Angiostrongylus), |
| | | levamisole |
| | Nicotinic receptor stabilizing | Alcuronium |
| | antagonists | |
| | Nicotinic receptor depolarizing | Suxamethonium |
| | antagonists | |
| | Nicotinic receptor allosteric | Galantamine |
| | modulators | |
| Glutamate receptors | NMDA subtype antagonists | Memantine |
| (ionotropic) | | |
| | NMDA subtype expression | Acamprosate |
| | modulators | |
| | NMDA subtype phencyclidine | Ketamine |
| | binding site antagonists | |

G-protein-coupled receptors

| | | |
|---|---|---|
| Acetylcholine receptors | Muscarinic receptor agonists | Pilocarpine |
| | Muscarinic receptor antagonists | Tropane derivatives |
| | Muscarinic receptor | Darifenacine |
| | M₃ antagonists | |
| Adenosine receptors | Agonists | Adenosine |
| | Adenosine A₁ receptor agonists | Lignans from valerian |
| | Adenosine A1 receptor | Caffeine, theophylline |
| | antagonists | |
| | Adenosine A_{2A} receptor | Caffeine, theophylline |
| | antagonists | |
| Adrenoceptors | Agonists | Adrenaline, noradrenaline, |
| | | ephedrine |
| | α₁- and α₂-receptors agonists | Xylometazoline |
| | α₁-receptor antagonists | Ergotamine |
| | α₂-receptor, central agonists | Methyldopa (as |
| | | methylnoradrenaline) |
| | β-adrenoceptor antagonists | Isoprenaline |
| | β₁-receptor antagonists | Propranolol, atenolol |
| | β₂-receptor agonists | Salbutamol |
| | β₂-receptor antagonists | Propranolol |
| Angiotensin receptors | AT₁-receptors antagonists | Sartans |
| Calcium-sensing receptor | Agonists | Strontium ions |
| | Allosteric activators | Cinacalcet |
| Cannabinoid receptors | CB₁- and CB₂-receptors | Dronabinol |
| | agonists | |
| Cysteinyl-leukotriene receptors | Antagonists | Montelukast |
| Dopamine receptors | Dopamine receptor subtype | Dopamine, levodopa |
| | direct agonists | |
| | D₂, D₃ and D₄ agonists | Apomorphine |
| | D₂, D₃ and D₄ antagonists | Chlorpromazine, fluphenazine, |
| | | haloperidol, metoclopramide, |
| | | ziprasidone |
| Endothelin receptors (ET_{A}, | Antagonists | Bosentan |
| ET_{B}) | | |
| GABA_{B} receptors | Agonists | Baclofen |
| Glucagon receptors | Agonists | Glucagon |
| Glucagon-like peptide-1 | Agonists | Exenatide |
| receptor | | |
| Histamine receptors | H₁-antagonists | Diphenhydramine |
| | H₂-antagonists | Cimetidine |
| Opioid receptors | μ-opioid agonists | Morphine, buprenorphine |
| | μ-, κ- and δ-opioid antagonists | Naltrexone |
| | κ-opioid antagonists | Buprenorphine |
| Neurokinin receptors | NK₁ receptor antagonists | Aprepitant |
| Prostanoid receptors | Agonists | Misoprostol, sulprostone, |
| | | iloprost |
| Prostamide receptors | Agonists | Bimatoprost |
| Purinergic receptors | P₂Y₁₂ antagonists | Clopidogrel |
| Serotonin receptors | Subtype-specific (partial) | Ergometrine, ergotamine |
| | agonists | |
| | 5-HT_{1A} partial agonists | Buspirone |
| | 5-HT_{1B/1D} agonists | Triptans |
| | 5-HT_{2A} antagonists | Quetiapine, ziprasidone |
| | 5-HT₃ antagonists | Granisetron |
| | 5-HT₄ partial agonists | Tegaserode |
| Vasopressin receptors | Agonists | Vasopressin |
| | V₁ agonists | Terlipressin |
| | V₂ agonists | Desmopressin |
| | OT agonists | Oxytocin |
| | OT antagonists | Atosiban |

Cytokine receptors

| | | |
|---|---|---|
| Class I cytokine receptors | Growth hormone receptor | Pegvisomant |
| | antagonists | |
| | Erythropoietin receptor | Erythropoietin |
| | agonists | |
| | Granulocyte colony stimulating | Filgrastim |
| | factor agonists | |
| | Granulocyte-macrophage | Molgramostim |
| | colony stimulating factor | |
| | agonists | |
| | Interleukin-1 receptor | Anakinra |
| | antagonists | |
| | Interleukin-2 receptor agonists | Aldesleukin |
| TNFα receptors | Mimetics (soluble) | Etanercept |

Integrin receptors

| | | |
|---|---|---|
| Glycoprotein IIb/IIIa receptor | Antagonists | Tirofiban |

Receptors associated with a tyrosine kinase

| | | |
|---|---|---|
| Insulin receptor | Direct agonists | Insulin |
| Insulin receptor | Sensitizers | Biguanides |

Nuclear receptors (steroid hormone receptors)

| | | |
|---|---|---|
| Mineralocorticoid receptor | Agonists | Aldosterone |
| | Antagonists | Spironolactone |
| Glucocorticoid receptor | Agonists | Glucocorticoids |
| Progesterone receptor | Agonists | Gestagens |
| Estrogen receptor | Agonists | Oestrogens |
| | (Partial) antagonists | Clomifene |
| | Antagonists | Fulvestrant |
| | Modulators | Tamoxifen, raloxifene |
| | Androgen receptor Agonists | Testosterone |
| | Antagonists | Cyproterone acetate |
| Vitamin D receptor | Agonists | Retinoids |
| ACTH receptor agonists | Agonists | Tetracosactide (also known as |
| | | cosyntropin) |

Nuclear receptors (other)

| | | |
|---|---|---|
| | α-Retinoic acid receptors | Isotretinoin |
| | RAR agonists | |
| | β-RAR agonists | Adapalene, isotretinoin |
| | γ-RAR agonists | Adapalene, isotretinoin |
| Peroxisome proliferator- | α-PPAR agonists | Fibrates |
| activated receptor (PPAR) | | |
| | γ-PPAR agonists | Glitazones |
| Thyroid hormone receptors | Agonists | L-Thyroxine |
| Voltage-gated Ca²⁺ channels | | |
| General | Inhibitor | Oxcarbazepine |
| In Schistosoma sp. | Inhibitor | Praziquantel |
| L-type channels | Inhibitor | Dihydropyridines, diltiazem, |
| | | lercanidipine, pregabalin, |
| | | verapamil |
| T-type channels | Inhibitor | Succinimides |

K+ channels

| | | |
|---|---|---|
| Epithelial K⁺ channels | Opener Inhibitor | Diazoxide, minoxidil |
| | | Nateglinide, sulphonylureas |
| Voltage-gated K⁺ channels | Inhibitor | Amiodarone |

Na⁺ channels

| | | |
|---|---|---|
| Epithelial Na+ channels (ENaC) | Inhibitor | Amiloride, bupivacaine, |
| | | lidocaine, procainamide, |
| | | quinidine |
| Voltage-gated Na⁺ channels | Inhibitor | Carbamazepine, flecainide, |
| | | lamotrigine, phenytoin, |
| | | propafenone, topiramate, |
| | | valproic acid |

Ryanodine-inositol 1,4,5-triphosphate receptor Ca²⁺ channel (RIR-CaC) family

| | | |
|---|---|---|
| Ryanodine receptors | Inhibitor | Dantrolene |

Transient receptor potential Ca²⁺ channel (TRP-CC) family

| | | |
|---|---|---|
| TRPV1 receptors | Inhibitor | Acetaminophen (as |
| | | arachidonylamide) |

Cl- channels

| | | |
|---|---|---|
| Cl⁻channel | Inhibitor (mast cells) Opener | Cromolyn sodium Ivermectin |
| | (parasites) | |
| Cation-chloride cotransporter | Thiazide-sensitive NaCl | Thiazide diuretics |
| (CCC) family | symporter, human inhibitor | |
| | Bumetanide-sensitive | Furosemide |
| | NaCl/KCl symporters, human | |
| | inhibitor | |
| Na⁺/H⁺ antiporters | Inhibitor | Amiloride, triamterene |
| Proton pumps | Ca²⁺-dependent ATPase | Artemisinin and derivatives |
| | (PfATP6; Plasmodia) inhibitor | |
| H⁺/K⁺-ATPase | Inhibitor | Omeprazole |
| Na⁺/K⁺ ATPase | Inhibitor | Cardiac glycosides |
| Eukaryotic (putative) sterol | Niemann-Pick C1 like 1 | Ezetimibe |
| transporter (EST) family | (NPC1L1) protein inhibitor | |
| Neurotransmitter/Na⁺ symporter | Serotonin/Na⁺ symporter | Cocaine, tricyclic |
| (NSS) family | inhibitor | antidepressants, paroxetine |
| | Noradrenaline/Na⁺ symporter | Bupropion, venlafaxine |
| | inhibitor | |
| | Dopamine/Na⁺ symporter | Tricyclic antidepressants, |
| | inhibitor | cocaine, amphetamines |
| | Vesicular monoamine | Reserpine |
| | transporter inhibitor | |

Nucleic acids

| | | |
|---|---|---|
| DNA and RNA | Alkylation | Chlorambucil, |
| | | cyclophosphamide, dacarbazine |
| | Complexation | Cisplatin |
| | Intercalation | Doxorubicin |
| | Oxidative degradation | Bleomycin |
| | Strand breaks | Nitroimidazoles |
| RNA | Interaction with 16S-rRNA | Aminoglycoside antiinfectives |
| | Interaction with 23S-rRNA | Macrolide antiinfectives |
| | 23S-rRNA/tRNA/2-polypeptide | Oxazolidinone antiinfectives |
| | complex | |
| Spindle | Inhibition of development | Vinca alkaloids |
| | Inhibition of desaggregation | Taxanes |
| Inhibition of mitosis | — | Colchicine |

Ribosome

| | | |
|---|---|---|
| 30S subunit (bacterial) | Inhibitors | Tetracyclines |
| 50S subunit (bacterial) | Inhibitors | Lincosamides, quinupristin- |
| | | dalfopristin |

TABLE 22
Exemplary sequences of a degradation domain

| SEQ | | |
|---|---|---|
| ID | Descrip- | |
| NO | tion | Sequence |
| SEQ | ER1 WT | SLALSLTADQMVSALLDAEPPILYSEYDPTRPFS |
| ID | (305aa- | EASMMGLLTNLADRELVHMINWAKRVPGFVDLTL |
| NO: | 549aa) | HDQVHLLECAWLEILMIGLVWRSMEHPGKLLFAP |
| 44 | amino | NLLLDRNQGKCVEGMVEIFDMLLATSSRFRMMNL |
| | acid | QGEEFVCLKSIILLNSGVYTFLSSTLKSLEEKDH |
| | sequence | IHRVLDKITDTLIHLMAKAGLTLQQQHQRLAQLL |
| | | LILSHIRHMSNKGMEHLYSMKCKNVVPLYDLLLE |
| | | MLDAHRL |
| SEQ | ER1 WT | tcgttggcactttccctgactgccgaccagatgg |
| ID | (305aa- | tgtccgcccttctggacgccgagcctccaattct |
| NO: | 549aa) | gtactcggagtacgatccgactcgcccgttctcc |
| 45 | nucleo- | gaagccagcatgatgggcctgttgactaacctgg |
| | tide | cggaccgcgagttggtgcacatgattaactgggc |
| | sequence | taagcgggtgccgggcttcgtggacctgactctg |
| | | cacgaccaagtgcacctcctggaatgcgcctggc |
| | | tggaaatcctcatgatcggcctcgtgtggagatc |
| | | catggagcatcccggaaagctcctgtttgcaccc |
| | | aacctcctgcttgatcgcaaccagggaaaatgcg |
| | | tggaagggatggtcgagattttcgacatgctgct |
| | | cgccacctcttcccggttccggatgatgaatctg |
| | | cagggagaagagttcgtgtgtctgaagtcaatca |
| | | tcctgctgaactccggggtctataccttcctgag |
| | | ctcgaccctcaagtcactggaggaaaaagaccac |
| | | atccatcgcgtgctcgataagatcaccgacaccc |
| | | ttatccatctcatggcgaaggctggactgaccct |
| | | gcaacagcagcaccagaggctggcccagagctgc |
| | | tgattctgagccacatccggcacatgtcgaacaa |
| | | ggggatggaacacctgtacagcatgaagtgcaag |
| | | aacgtcgtgcctctgtacgatctgctcctggaaa |
| | | tgctggacgcgcacagactc |
| SEQ | ERmut1 (6 | SLALSLTADQMVSALLDAEPPILYSEYDPTRPFS |
| ID | mutations) | EASMMGLLTNLADRELVHMINWAKRVPGFVDLAL |
| NO: | amino | HDQVHLLECAWMEILMIGLVWRSMEHPGKLLFAP |
| 46 | acid | NLLLDRNQGKCVEGGVEIFDMLLATSSRFRMMNL |
| | sequence | QGEEFVCLKSIILLNSGVYTFLSSTLKSLEEKDH |
| | | IHRVLDKITDTLIHLMAKAGLTLQQQHQRLAQLL |
| | | LILSHIRHMSSKRMEHLYSMKCKNVVPLSDLLLE |
| | | MLDAHRL |
| SEQ | ERmut1 (6 | tcgttggcactttccctgactgccgaccagatgg |
| ID | mutations) | tgtccgcccttctggacgccgagcctccaattct |
| NO: | nucleo- | gtactcggagtacgatccgactcgcccgttctcc |
| 47 | tide | gaagccagcatgatgggcctgttgactaacctgg |
| | sequence | cggaccgcgagttggtgcacatgattaactgggc |
| | | taagcgggtgccgggcttcgtggacctggccctg |
| | | cacgaccaagtgcacctcctggaatgcgcctgga |
| | | tggaaatcctcatgatcggcctcgtgtggagatc |
| | | catggagcatcccggaaagctcctgtttgcaccc |
| | | aacctcctgcttgatcgcaaccagggaaaatgcg |
| | | tggaagggggtgtcgagattttcgacatgctgct |
| | | cgccacctcttcccggttccggatgatgaatctg |
| | | cagggagaagagttcgtgtgtctgaagtcaatca |
| | | tcctgctgaactccggggtctataccttcctgag |
| | | ctcgaccctcaagtcactggaggaaaaagaccac |
| | | atccatcgcgtgctcgataagatcaccgacaccc |
| | | ttatccatctcatggcgaaggctggactgaccct |
| | | gcaacagcagcaccagaggctggcccagagctgc |
| | | tgattctgagccacatccggcacatgtcgtccaa |
| | | gaggatggaacacctgtacagcatgaagtgcaag |
| | | aacgtcgtgcctctgtccgatctgctcctggaaa |
| | | tgctggacgcgcacagactc |
| SEQ | ERmut2 (4 | SLALSLTADQMVSALLDAEPPILYSEYDPTRPFS |
| ID | mutations) | EASMMGLLTNLADRELVHMINWAKRVPGFVDLTL |
| NO: | amino | HDQVHLLECAWMEILMIGLVWRSMEHPGKLLFAP |
| 48 | acid | NLLLDRNQGKCVEGGVEIFDMLLATSSRFRMMNL |
| | sequence | QGEEFVCLKSIILLNSGVYTFLSSTLKSLEEKDH |
| | | IHRVLDKITDTLIHLMAKAGLTLQQQHQRLAQLL |
| | | LILSHIRHMSNKRMEHLYSMKCKNVVPLSDLLLE |
| | | MLDAHRL |
| SEQ | ERmut2 (4 | tcgttggcactttccctgactgccgaccagatgg |
| ID | mutations) | tgtccgcccttctggacgccgagcctccaattct |
| NO: | nucleo- | gtactcggagtacgatccgactcgcccgttctcc |
| 49 | tide | gaagccagcatgatgggcctgttgactaacctgg |
| | sequence | cggaccgcgagttggtgcacatgattaactgggc |
| | | taagcgggtgccgggcttcgtggacctgaccctg |
| | | cacgaccaagtgcacctcctggaatgcgcctgga |
| | | tggaaatcctcatgatcggcctcgtgtggagatc |
| | | catggagcatcccggaaagctcctgtttgcaccc |
| | | aacctcctgcttgatcgcaaccagggaaaatgcg |
| | | tggaagggggtgtcgagattttcgacatgctgct |
| | | cgccacctcttcccggttccggatgatgaatctg |
| | | cagggagaagagttcgtgtgtctgaagtcaatca |
| | | tcctgctgaactccggggtctataccttcctgag |
| | | ctcgaccctcaagtcactggaggaaaaagaccac |
| | | atccatcgcgtgctcgataagatcaccgacaccc |
| | | ttatccatctcatggcgaaggctggactgaccct |
| | | gcaacagcagcaccagaggctggcccagagctgc |
| | | tgattctgagccacatccggcacatgtcgaacaa |
| | | gaggatggaacacctgtacagcatgaagtgcaag |
| | | aacgtcgtgcctctgtccgatctgctcctggaaa |
| | | tgctggacgcgcacagactc |
| SEQ | FKBP | GVQVETISPGDGRTFPKRGQTCVVHYTGMLEDGK |
| ID | L106P | KVDSSRDRNKPFKFMLGKQEVIRGWEEGVAQMSV |
| NO: | amino | GQRAKLTISPDYAYGATGHPGIIPPHATLVFDVE |
| 50 | acid | LLKPE |
| | sequence | |
| SEQ | DHFR | ISLIAALAVDYVIGMENAMPWNLPADLAWFKRNT |
| ID | R12Y/G27S/ | LNKPVIMGRHTWESIGRPLPGRKNIILSSQPSTD |
| NO: | Y100I | DRVTWVKSVDEAIAACGDVPEIMVIGGGRVIEQF |
| 51 | amino | LPKAQKLYLTHIDAEVEGDTHFPDYEPDDWESVF |
| | acid | SEFHDADAQNSHSYCFEILERR |
| | sequence | |

[1223] Degradation domains can be engineered from known proteins (e.g., those proteins set forth in Table 21) through any of a variety of routine methods known in the art. Generally, such methods employ first creating a library of interest including proteins derived from the, e.g., naturally occurring protein. Second, cells or cell populations expressing proteins from individual library constructs will be selected on the basis of whether the expression of the derived protein is dependent on the presence of the desired stabilization compound. The process of derivation and selection can be repeated in as many cycles as necessary to identify a suitable candidate.

[1224] For example, a library can be created through rational protein design based on sampling different structures and putative affinities of the protein domain to the selected compound. Alternatively, a library can be generated by random mutagenesis of the target protein. In either case, e.g., Jurkat cells can be transduced with a lentiviral library generated from the constructs. Jurkat cells can then undergo a round of FACS sorting, to eliminate cells that constitutively express the protein of interest. In the next stage, the sorted cells are incubated with the compound of choice for 24 hrs and positive cells are FACS sorted. These are expanded through single cell cloning. From there, individual transduced clones will be assessed for the ability to induce expression of the protein of interest in a compound-dependent manner.

[1225] In some embodiments, the fusion polypeptide of the invention comprises a degradation domain, a COF1/CRBN-, COF2/CRBN-, or COF3/CRBN-binding polypeptide, and a heterologous polypeptide. In some embodiments, the expression level of the fusion polypeptide in the presence of the stabilization compound is increased by at least, e.g., 1.5-, 2-, 3-, 4-, 5-, 10-, 20-, 30-, 40-, or 50-fold, compared to the expression level of the fusion polypeptide in the absence of the stabilization compound, e.g., as measured by an assay described herein, e.g., a Western blot analysis or a flow cytometry analysis.

### Cleavage Site

[1226] In some embodiments, the fusion polypeptide of the invention comprises a first domain and a second domain separated by a heterologous cleavage site, wherein the first domain comprises a degradation domain and the second domain comprises a COF1/CRBN-, COF2/CRBN-, or COF3/CRBN-binding polypeptide and a heterologous polypeptide.

[1227] The cleavage site can either be a self-cleavage site and/or a protease cleavage site. The cleavage site can be designed to be cleaved by any site-specific protease that is expressed in a cell of interest (either through recombinant expression or endogenous expression) at adequate levels to cleave off the degradation domain. In important aspects of the invention, the protease cleavage site is chosen to correspond to a protease natively (or by virtue of cell engineering) to be present in a cellular compartment relevant to the expression of the protein of interest. The intracellular trafficking of the protease should overlap or partially overlap with the intracellular trafficking of the protein of interest that contains the degradation domain employed. For example, if the protein of interest is located at the cell surface, the enzyme to cleave it can be added exogenously to the cell.

[1228] If the protein of interest resides in the endosomal/lysosomal system a protease cleavage site for an enzyme resident in those compartments can be used. Such protease/consensus motifs include, e.g.,
[1229] Furin: RX(K/R)R consensus motif (X can be any amino acid; SEQ ID NO: 52)
[1230] PCSK1: RX(K/R)R consensus motif (X can be any amino acid; SEQ ID NO: 52)
[1231] PCSK5: RX(K/R)R consensus motif (X can be any amino acid; SEQ ID NO: 52)
[1232] PCSK6: RX(K/R)R consensus motif (X can be any amino acid; SEQ ID NO: 52)
[1233] PCSK7: RXXX[KR]R consensus motif (X can be an amino acid; SEQ ID NO: 53)

Cathepsin B:
(SEQ ID NO: 54)
RRX
Granzyme B:
(SEQ ID NO: 55)
I-E-P-D-X
Factor XA:
(SEQ ID NO: 56)
Ile-Glu/Asp-Gly-Arg
Enterokinase:
(SEQ ID NO: 57)
Asp-Asp-Asp-Asp-Lys
Genenase:
(SEQ ID NO: 58)
Pro-Gly-Ala-Ala-His-Tyr
Sortase:
(SEQ ID NO: 59)
LPXTG/A
PreScission protease:
(SEQ ID NO: 60)
Leu-Glu-Val-Phe-Gln-Gly-Pro
Thrombin:
(SEQ ID NO: 61)
Leu-Val-Pro-Arg-Gly-Ser
TEV protease:
(SEQ ID NO: 62)
E-N-L-Y-F-Q-G
Elastase 1:
[AGSV]-X
(X can be any amino acid; SEQ ID NO: 63)

[1234] In some embodiments, the fusion polypeptide described herein includes a furin cleavage site. In some embodiments, the fusion polypeptides described herein include any one of furin cleavage sites listed in Table 23.

[1235] In some embodiments, the fusion polypeptides described herein include a furin cleavage site selected from RTKR (SEQ ID NO: 123) or a sequence having at least 90%, 95%, 97%, 98%, or 99% identity thereto; GTGAEDPRPSRKRRSLGDVG (SEQ ID NO: 125) or a sequence having at least 90%, 95%, 97%, 98%, or 99% identity thereto; GTGAEDPRPSRKRR (SEQ ID NO: 127) or a sequence having at least 90%, 95%, 97%, 98%, or 99% identity thereto; LQWLEQQVAKRRTKR (SEQ ID NO: 129) or a sequence having at least 90%, 95%, 97%, 98%, or 99% identity thereto; GTGAEDPRPSRKRRSLGG (SEQ ID NO: 131) or a sequence having at least 90%, 95%, 97%, 98%, or 99% identity thereto; GTGAEDPRPSRKRRSLG (SEQ ID NO: 133) or a sequence having at least 90%, 95%, 97%, 98%, or 99% identity thereto; SLNLTESHNSRKKR (SEQ ID NO: 135) or a sequence having at least 90%, 95%, 97%, 98%, or 99% identity thereto; or CKINGYPKRGRKRR (SEQ ID NO: 137) or a sequence having at least 90%, 95%, 97%, 98%, or 99% identity thereto.

[1236] In some embodiments, the fusion polypeptides described herein include a furin cleavage site selected from RTKR (SEQ ID NO: 123); GTGAEDPRPSRKRRSLGDVG (SEQ ID NO: 125); GTGAEDPRPSRKRR (SEQ ID NO: 127); LQWLEQQVAKRRTKR (SEQ ID NO: 129); GTGAEDPRPSRKRRSLGG (SEQ ID NO: 131); GTGAEDPRPSRKRRSLG (SEQ ID NO: 133); SLNLTESHNSRKKR (SEQ ID NO: 135); or CKINGYPKRGRKRR (SEQ ID NO: 137).

[1237] In some embodiments, the fusion polypeptides described herein include a furin cleavage site selected from GTGAEDPRPSRKRRSLGDVG (SEQ ID NO: 125) or a sequence having at least 90%, 95%, 97%, 98%, or 99% identity thereto, or GTGAEDPRPSRKRR (SEQ ID NO: 127) or a sequence having at least 90%, 95%, 97%, 98%, or 99% identity thereto.

[1238] In some embodiments, the fusion polypeptides described herein include a furin cleavage site selected from GTGAEDPRPSRKRRSLGDVG (SEQ ID NO: 125) or GTGAEDPRPSRKRR (SEQ ID NO: 127).

[1239] In some embodiments, the fusion polypeptides described herein include the furin cleavage site of GTGAEDPRPSRKRRSLGDVG (SEQ ID NO: 125).

TABLE 23
Exemplary furin cleavage site

| | Amino acid | |
|---|---|---|
| | sequence | Nucleic acid sequence |
| Furin | RTKR | cgtactaaaaga |
| cleavage | (SEQ ID | (SEQ ID NO: 139) |
| site1 | NO: 123) | |
| Furin | GTGAEDPRP | ggaaccggcgcggaagaccccc |
| cleavage | SRVG | ggccctccaggaagcgaaggtc |
| site2 | (SEQ ID | cctcggagacgtgggt |
| | NO: 125) | (SEQ ID NO: 126) |
| Furin | GTGAEDPRP | ggaaccggcgcggaagaccccc |
| cleavage | SRKRR | ggccctccaggaagcgaagg |
| site3 | (SEQ ID | (SEQ ID NO: 128) |
| | NO: 127) | |
| Furin | LQWLEQQVA | ctgcaatggctggagcagcagg |
| cleavage | KRRTKR | tggcgaagcggagaactaag |
| site4 | (SEQ ID | cgg |
| | NO: 129) | (SEQ ID NO: 130) |
| Furin | GTGAEDPRP | ggcacaggtgccgaggaccctc |
| cleavage | SRKRRSLGG | ggccaagccgcaaaaggaggtc |
| site5 | (SEQ ID | acttggcggc |
| | NO: 131) | (SEQ ID NO: 132) |
| Furin | GTGAEDPRP | ggaaccggagcagaagatccca |
| cleavage | SRKRRSLG | gaccaagccggaaaaggcggtc |
| site6 | (SEQ ID | cctgggt |
| | NO: 133) | (SEQ ID NO: 134) |
| Furin | SLNLTESHN | agtctcaatttgactgagtcac |
| cleavage | SRKKR | acaattccaggaagaaaagg |
| site7 | (SEQ ID | (SEQ ID NO: 136) |
| | NO: 135) | |
| Furin | CKINGYPKR | tgcaagatcaacggctacccta |
| cleavage | GRKRR | agaggggcagaaagcgg |
| site8 | (SEQ ID | cgg |
| | NO: 137) | (SEQ ID NO: 138) |

### Signal Peptide

[1240] In certain embodiments, the fusion polypeptides of the invention further include a signal peptide. Signal peptides are useful if it is desirable to have the protein follow the secretory pathway. In some embodiments, this signal peptide will be engineered to be present at the very N-terminus of the fusion polypeptide. Exemplary signal peptides are set forth below:

CD8:
(SEQ ID NO: 64)
MALPVTALLLPLALLLHAARP
GMCSFR:
(SEQ ID NO: 65)
MLLLVTSLLLCELPHPAFLLIP
IL2:
(SEQ ID NO: 66)
MYRMQLLSCIALSLALVTNS
IgK chain:
(SEQ ID NO: 67)
MAQVKLQESGTELAKPGAAVK
NPC2:
(SEQ ID NO: 68)
MRFLAATFLLLALSTAAQA
LAMB1:
(SEQ ID NO: 69)
MGLLQLLAFSFLALCRARVRA
P3IP1:
(SEQ ID NO: 70)
MLLAWVQAFLVSNMLLAEAYG
DMKN:
(SEQ ID NO: 71)
MKFQGPLACLLLALCLGSGEA
TPA:
(SEQ ID NO: 72)
MDAMKRGLCCVLLLCGAVFVSP
PCSK9:
(SEQ ID NO: 73)
MGTVSSRRSWWPLPLLLLLLLLLGPAGARAQEDED

[1241] KDEL (SEQ ID NO: 74) or KKXX (X can be any amino acid; SEQ ID NO: 75) and derivatives at the very C-terminus of the protein of interest can be engineered if the protein of interest is an ER-resident protein. These sequences must be inserted together with the signal peptide.

[1242] Proteins of interest can be engineered to include glycosylation patterns for internalization via mannose-6-phosphate receptor and targeting to the endosomal/lysosomal system. These should be included in the protein of interest itself, if this is a protein resident in that compartment. Consensus for N-glycosylation is Asn-X-Ser/Thr, where X is any amino acid except proline (Pro), serine (Ser), and threonine (Thr) (SEQ ID NO: 76).

[1243] In embodiments where it is desirable to have proteins of interested targeted at the peroxisome, the fusion polypeptide can be engineered to include a C-terminal peroxisomal targeting signal (e.g., PTS1: —SKL).

### Nucleic Acid and Vectors Encoding Fusion Polypeptides

[1244] In another aspect, the invention pertains to a nucleic acid encoding any of the fusion polypeptides described herein, or a vector comprising such a nucleic acid. In one embodiment, the vector is chosen from a DNA vector, an RNA vector, a plasmid, a lentivirus vector, adenoviral vector, or a retrovirus vector. In one embodiment, the vector is a lentivirus vector.

[1245] The present disclosure also provides vectors in which a DNA of the present disclosure is inserted. Vectors derived from retroviruses such as the lentivirus are suitable tools to achieve long-term gene transfer since they allow long-term, stable integration of a transgene and its propagation in daughter cells. Lentiviral vectors have the added advantage over vectors derived from onco-retroviruses such as murine leukemia viruses in that they can transduce non-proliferating cells, such as hepatocytes. They also have the added advantage of low immunogenicity. A retroviral vector may also be, e.g., a gammaretroviral vector. A gammaretroviral vector may include, e.g., a promoter, a packaging signal (Y), a primer binding site (PBS), one or more (e.g., two) long terminal repeats (LTR), and a transgene of interest, e.g., a gene encoding a CAR. A gammaretroviral vector may lack viral structural gens such as gag, pol, and env. Exemplary gammaretroviral vectors include Murine Leukemia Virus (MLV), Spleen-Focus Forming Virus (SFFV), and Myeloproliferative Sarcoma Virus (MPSV), and vectors derived therefrom. Other gammaretroviral vectors are described, e.g., in Tobias Maetzig et al., “Gammaretroviral Vectors: Biology, Technology and Application” Viruses. 2011 June; 3(6): 677-713, which is hereby incorporated herein by reference.

[1246] In another embodiment, the vector comprising the nucleic acid encoding the desired fusion polypeptide of the invention is an adenoviral vector (A5/35). In another embodiment, the expression of nucleic acids encoding chimeric molecules can be accomplished using transposons such as sleeping beauty, using gene editing tools such as CRISPR (e.g., CAS9), or using zinc finger nucleases. See, e.g., June et al. 2009, Nature Reviews Immunology 9.10: 704-716, which is hereby incorporated herein by reference.

[1247] The nucleic acid can be cloned into a number of types of vectors. For example, the nucleic acid can be cloned into a vector including, but not limited to a plasmid, a phagemid, a phage derivative, an animal virus, and a cosmid. Vectors of particular interest include expression vectors, replication vectors, probe generation vectors, and sequencing vectors.

### Nucleic Acid Constructs Encoding the Fusion Polypeptides, e.g., a CAR Comprising a COF1/CRBN-COF2/CRBN-, or COF3/CRBN-Binding Polypeptide

[1248] The present disclosure also provides nucleic acid molecules encoding one or more of the fusion polypeptide disclosed herein.

[1249] In one embodiment, the fusion polypeptide comprises a CAR constructs that targets a tumor antigen and/or a B cell antigen described herein. In one aspect, the nucleic acid molecule is provided as a messenger RNA transcript. In one aspect, the nucleic acid molecule is provided as a DNA construct.

[1250] Accordingly, in one aspect, the invention pertains to a nucleic acid molecule encoding a fusion polypeptide that comprises a COF1/CRBN-, COF2/CRBN-, or COF3/CRBN-binding polypeptide and a heterologous polypeptide. In some embodiments, the heterologous polypeptide is a chimeric antigen receptor (CAR), wherein the CAR comprises an antigen binding domain that binds to a tumor antigen described herein or a B cell antigen described herein, a transmembrane domain (e.g., a transmembrane domain described herein), and an intracellular signaling domain (e.g., an intracellular signaling domain described herein) comprising a stimulatory domain, e.g., a costimulatory signaling domain (e.g., a costimulatory signaling domain described herein) and/or a primary signaling domain (e.g., a primary signaling domain described herein, e.g., a zeta chain described herein). In one embodiment, the transmembrane domain is transmembrane domain of a protein selected from the group consisting of the alpha, beta or zeta chain of the T-cell receptor, CD28, CD3 epsilon, CD45, CD4, CD5, CD8, CD9, CD16, CD22, CD33, CD37, CD64, CD80, CD86, CD134, CD137 and CD154. In some embodiments, a transmembrane domain may include at least the transmembrane region(s) of, e.g., KIRDS2, OX40, CD2, CD27, LFA-1 (CD11a, CD18), ICOS (CD278), 4-1BB (CD137), GITR, CD40, BAFFR, HVEM (LIGHTR), SLAMF7, NKp80 (KLRF1), NKp44, NKp30, NKp46, CD160, CD19, IL2R beta, IL2R gamma, IL7R α, ITGA1, VLA1, CD49a, ITGA4, IA4, CD49D, ITGA6, VLA-6, CD49f, ITGAD, CD11d, ITGAE, CD103, ITGAL, CD11a, LFA-1, ITGAM, CD11b, ITGAX, CD11c, ITGB1, CD29, ITGB2, CD18, LFA-1, ITGB7, NKG2D, NKG2C, TNFR2, DNAM1 (CD226), SLAMF4 (CD244, 2B4), CD84, CD96 (Tactile), CEACAM1, CRTAM, Ly9 (CD229), CD160 (BY55), PSGL1, CD100 (SEMA4D), SLAMF6 (NTB-A, Ly108), SLAM (SLAMF1, CD150, IPO-3), BLAME (SLAMF8), SELPLG (CD162), LTBR, PAG/Cbp, NKG2D, and NKG2C.

[1251] In one embodiment, the transmembrane domain comprises the sequence of SEQ ID NO: 155, or a sequence with 95-99% identity thereof. In one embodiment, the antigen binding domain is connected to the transmembrane domain by a hinge region, e.g., a hinge described herein. In one embodiment, the hinge region comprises SEQ ID NO: 147 or SEQ ID NO: 149 or SEQ ID NO: 151 or SEQ ID NO: 153, or a sequence with 95-99% identity thereof. In one embodiment, the isolated nucleic acid molecule further comprises a sequence encoding a costimulatory domain. In one embodiment, the costimulatory domain is a functional signaling domain of a protein selected from the group consisting of OX40, CD27, CD28, CDS, ICAM-1, LFA-1 (CD11a/CD18), ICOS (CD278), and 4-1BB (CD137). Further examples of such costimulatory molecules include CDS, ICAM-1, GITR, BAFFR, HVEM (LIGHTR), SLAMF7, NKp80 (KLRF1), NKp44, NKp30, NKp46, CD160, CD19, CD4, CD8alpha, CD8beta, IL2R beta, IL2R gamma, IL7R alpha, ITGA4, VLA1, CD49a, ITGA4, IA4, CD49D, ITGA6, VLA-6, CD49f, ITGAD, CD11d, ITGAE, CD103, ITGAL, CD11a, LFA-1, ITGAM, CD11b, ITGAX, CD11c, ITGB1, CD29, ITGB2, CD18, LFA-1, ITGB7, NKG2D, NKG2C, TNFR2, TRANCE/RANKL, DNAM1 (CD226), SLAMF4 (CD244, 2B4), CD84, CD96 (Tactile), CEACAM1, CRTAM, Ly9 (CD229), CD160 (BY55), PSGL1, CD100 (SEMA4D), CD69, SLAMF6 (NTB-A, Ly108), SLAM (SLAMF1, CD150, IPO-3), BLAME (SLAMF8), SELPLG (CD162), LTBR, LAT, GADS, SLP-76, PAG/Cbp, NKG2D, and NKG2C. In one embodiment, the intracellular signaling domain comprises a functional signaling domain of 4-1BB and a functional signaling domain of CD3 zeta. In one embodiment, the intracellular signaling domain comprises the sequence of SEQ ID NO: 158, 161, 176, or 180, or a sequence with 95-99% identity thereof, and the sequence of SEQ ID NO: 163 or SEQ ID NO: 166, or a sequence with 95-99% identity thereof, wherein the sequences comprising the intracellular signaling domain are expressed in the same frame and as a single polypeptide chain.

[1252] In another aspect, the invention pertains to an isolated nucleic acid molecule encoding a fusion polypeptide, e.g., as described herein, comprising a domain that includes a CAR construct comprising a leader sequence of SEQ ID NO: 64, a scFv domain as described herein, a hinge region of SEQ ID NO: 147 or SEQ ID NO: 149 or SEQ ID NO: 151 or SEQ ID NO: 153 (or a sequence with 95-99% identity thereof), a transmembrane domain having a sequence of SEQ ID NO: 155 (or a sequence with 95-99% identity thereof), a 4-1BB costimulatory domain having a sequence of SEQ ID NO:158, a CD27 costimulatory domain having a sequence of SEQ ID NO: 161 (or a sequence with 95-99% identity thereof), a ICOS costimulatory domain having a sequence of SEQ ID NO: 176 (or a sequence with 95-99% identity thereof) or a CD28 costimulatory domain having a sequence of SEQ ID NO: 180, and a CD3 zeta stimulatory domain having a sequence of SEQ ID NO: 163 or SEQ ID NO: 166 (or a sequence with 95-99% identity thereof).

[1253] The nucleic acid sequences coding for the desired molecules can be obtained using recombinant methods known in the art, such as, for example by screening libraries from cells expressing the gene, by deriving the gene from a vector known to include the same, or by isolating directly from cells and tissues containing the same, using standard techniques. Alternatively, the gene of interest can be produced synthetically, rather than cloned.

[1254] The present disclosure also provides vectors in which a nucleic acid of the present disclosure is inserted. Vectors derived from retroviruses such as the lentivirus are suitable tools to achieve long-term gene transfer since they allow long-term, stable integration of a transgene and its propagation in daughter cells. Lentiviral vectors have the added advantage over vectors derived from onco-retroviruses such as murine leukemia viruses in that they can transduce non-proliferating cells, such as hepatocytes. They also have the added advantage of low immunogenicity.

[1255] In brief summary, the expression of recombinant nucleic acids encoding a fusion polypeptide of this invention is typically achieved by operably linking a nucleic acid encoding the fusion polypeptide to a promoter, and incorporating the construct into an expression vector. The vectors can be suitable for replication and integration eukaryotes. Typical cloning vectors contain transcription and translation terminators, initiation sequences, and promoters useful for regulation of the expression of the desired nucleic acid sequence.

[1256] The expression constructs of the present disclosure may also be used for nucleic acid immunization and gene therapy, using standard gene delivery protocols. Methods for gene delivery are known in the art. See, e.g., U.S. Pat. Nos. 5,399,346, 5,580,859, 5,589,466, incorporated by reference herein in their entireties. In another embodiment, the invention provides a gene therapy vector.

[1257] The nucleic acid can be cloned into a number of types of vectors. For example, the nucleic acid can be cloned into a vector including, but not limited to a plasmid, a phagemid, a phage derivative, an animal virus, and a cosmid. Vectors of particular interest include expression vectors, replication vectors, probe generation vectors, and sequencing vectors.

[1258] Further, the expression vector may be provided to a cell in the form of a viral vector. Viral vector technology is well known in the art and is described, for example, in Sambrook et al., 2012, MOLECULAR CLONING: A LABORATORY MANUAL, volumes 1-4, Cold Spring Harbor Press, NY), and in other virology and molecular biology manuals. Viruses, which are useful as vectors include, but are not limited to, retroviruses, adenoviruses, adeno-associated viruses, herpes viruses, and lentiviruses. In general, a suitable vector contains an origin of replication functional in at least one organism, a promoter sequence, convenient restriction endonuclease sites, and one or more selectable markers, (e.g., WO 01/96584; WO 01/29058; and U.S. Pat. No. 6,326,193).

[1259] A number of viral based systems have been developed for gene transfer into mammalian cells. For example, retroviruses provide a convenient platform for gene delivery systems. A selected gene can be inserted into a vector and packaged in retroviral particles using techniques known in the art. The recombinant virus can then be isolated and delivered to cells of the subject either in vivo or ex vivo. A number of retroviral systems are known in the art. In some embodiments, adenovirus vectors are used. A number of adenovirus vectors are known in the art. In one embodiment, lentivirus vectors are used.

[1260] Additional promoter elements, e.g., enhancers, regulate the frequency of transcriptional initiation. Typically, these are located in the region 30-110 bp upstream of the start site, although a number of promoters have been shown to contain functional elements downstream of the start site as well. The spacing between promoter elements frequently is flexible, so that promoter function is preserved when elements are inverted or moved relative to one another. In the thymidine kinase (tk) promoter, the spacing between promoter elements can be increased to 50 bp apart before activity begins to decline. Depending on the promoter, it appears that individual elements can function either cooperatively or independently to activate transcription. Exemplary promoters include the CMV IE gene, EF-1α, ubiquitin C, or phosphoglycerokinase (PGK) promoters.

[1261] In some embodiments, the promoter is a tissue specific promoter. In some embodiments, the promoter is activated at a specific developmental stage. In some embodiments, the promoter is an inducible promoter. In some embodiments, the promoter is a tetracycline inducible promoter. In some embodiments, the promoter is a metallothionein promoter. In some embodiments, the promoter is an HSV TK promoter.

[1262] An example of a promoter that is capable of expressing a fusion polypeptide, e.g., as described herein, comprising a domain that includes aCAR encoding nucleic acid molecule in a mammalian T cell is the EF1a promoter. The native EF1a promoter drives expression of the alpha subunit of the elongation factor-1 complex, which is responsible for the enzymatic delivery of aminoacyl tRNAs to the ribosome. The EF1a promoter has been extensively used in mammalian expression plasmids and has been shown to be effective in driving expression of a fusion polypeptide, e.g., as described herein, a fusion polypeptide comprising a domain that includes a CAR, from nucleic acid molecules cloned into a lentiviral vector. See, e.g., Milone et al., Mol. Ther. 17(8): 1453-1464 (2009). In one aspect, the EF1a promoter comprises the sequence provided as SEQ ID NO:1.

[1263] Another example of a promoter is the immediate early cytomegalovirus (CMV) promoter sequence. This promoter sequence is a strong constitutive promoter sequence capable of driving high levels of expression of any polynucleotide sequence operatively linked thereto. However, other constitutive promoter sequences may also be used, including, but not limited to the simian virus 40 (SV40) early promoter, mouse mammary tumor virus (MMTV), human immunodeficiency virus (HIV) long terminal repeat (LTR) promoter, MoMuLV promoter, an avian leukemia virus promoter, an Epstein-Barr virus immediate early promoter, a Rous sarcoma virus promoter, as well as human gene promoters such as, but not limited to, the actin promoter, the myosin promoter, the elongation factor-1 promoter, the hemoglobin promoter, and the creatine kinase promoter. Further, the invention should not be limited to the use of constitutive promoters. Inducible promoters are also contemplated as part of the invention. The use of an inducible promoter provides a molecular switch capable of turning on expression of the polynucleotide sequence which it is operatively linked when such expression is desired, or turning off the expression when expression is not desired. Examples of inducible promoters include, but are not limited to a metallothionine promoter, a glucocorticoid promoter, a progesterone promoter, and a tetracycline promoter.

[1264] Another example of a promoter is the phosphoglycerate kinase (PGK) promoter. In embodiments, a truncated PGK promoter (e.g., a PGK promoter with one or more, e.g., 1, 2, 5, 10, 100, 200, 300, or 400, nucleotide deletions when compared to the wild-type PGK promoter sequence) may be desired. The nucleotide sequences of exemplary PGK promoters are provided below.

WT PGK Promoter
(SEQ ID NO: 823)
ACCCCTCTCTCCAGCCACTAAGCCAGTTGCTCCCTCGGCTGACGGCTG
CACGCGAGGCCTCCGAACGTCTTACGCCTTGTGGCGCGCCCGTCCTTG
TCCCGGGTGTGATGGCGGGGTGTGGGGCGGAGGGCGTGGCGGGGAAGG
GCCGGCGACGAGAGCCGCGCGGGACGACTCGTCGGCGATAACCGGTGT
CGGGTAGCGCCAGCCGCGCGACGGTAACGAGGGACCGCGACAGGCAGA
CGCTCCCATGATCACTCTGCACGCCGAAGGCAAATAGTGCAGGCCGTG
CGGCGCTTGGCGTTCCTTGGAAGGGCTGAATCCCCGCCTCGTCCTTCG
CAGCGGCCCCCCGGGTGTTCCCATCGCCGCTTCTAGGCCCACTGCGAC
GCTTGCCTGCACTTCTTACACGCTCTGGGTCCCAGCCGCGGCGACGCA
AAGGGCCTTGGTGCGGGTCTCGTCGGCGCAGGGACGCGTTTGGGTCCC
GACGGAACCTTTTCCGCGTTGGGGTTGGGGCACCATAAGCT

Exemplary truncated PGK Promoters:
PGK100:
(SEQ ID NO: 824)
ACCCCTCTCTCCAGCCACTAAGCCAGTTGCTCCCTCGGCTGACGGCTG
CACGCGAGGCCTCCGAACGTCTTACGCCTTGTGGCGCGCCCGTCCTTG
TCCCGGGTGTGATGGCGGGGTG
PGK200:
(SEQ ID NO: 825)
ACCCCTCTCTCCAGCCACTAAGCCAGTTGCTCCCTCGGCTGACGGCTG
CACGCGAGGCCTCCGAACGTCTTACGCCTTGTGGCGCGCCCGTCCTTG
TCCCGGGTGTGATGGCGGGGTGTGGGGCGGAGGGCGTGGCGGGGAAGG
GCCGGCGACGAGAGCCGCGCGGGACGACTCGTCGGCGATAACCGGTGT
CGGGTAGCGCCAGCCGCGCGACGGTAACG
PGK300:
(SEQ ID NO: 826)
ACCCCTCTCTCCAGCCACTAAGCCAGTTGCTCCCTCGGCTGACGGCTG
CACGCGAGGCCTCCGAACGTCTTACGCCTTGTGGCGCGCCCGTCCTTG
TCCCGGGTGTGATGGCGGGGTGTGGGGCGGAGGGCGTGGCGGGGAAGG
GCCGGCGACGAGAGCCGCGCGGGACGACTCGTCGGCGATAACCGGTGT
CGGGTAGCGCCAGCCGCGCGACGGTAACGAGGGACCGCGACAGGCAGA
CGCTCCCATGATCACTCTGCACGCCGAAGGCAAATAGTGCAGGCCGTG
CGGCGCTTGGCGTTCCTTGGAAGGGCTGAATCCCCG
PGK400:
(SEQ ID NO: 827)
ACCCCTCTCTCCAGCCACTAAGCCAGTTGCTCCCTCGGCTGACGGCTG
CACGCGAGGCCTCCGAACGTCTTACGCCTTGTGGCGCGCCCGTCCTTG
TCCCGGGTGTGATGGCGGGGTGTGGGGCGGAGGGCGTGGCGGGGAAGG
GCCGGCGACGAGAGCCGCGCGGGACGACTCGTCGGCGATAACCGGTGT
CGGGTAGCGCCAGCCGCGCGACGGTAACGAGGGACCGCGACAGGCAGA
CGCTCCCATGATCACTCTGCACGCCGAAGGCAAATAGTGCAGGCCGTG
CGGCGCTTGGCGTTCCTTGGAAGGGCTGAATCCCCGCCTCGTCCTTCG
CAGCGGCCCCCCGGGTGTTCCCATCGCCGCTTCTAGGCCCACTGCGAC
GCTTGCCTGCACTTCTTACACGCTCTGGGTCCCAGCCG

[1265] A vector may also include, e.g., a signal sequence to facilitate secretion, a polyadenylation signal and transcription terminator (e.g., from Bovine Growth Hormone (BGH) gene), an element allowing episomal replication and replication in prokaryotes (e.g. SV40 origin and ColE1 or others known in the art) and/or elements to allow selection (e.g., ampicillin resistance gene and/or zeocin marker).

[1266] In order to assess the expression of a fusion polypeptide, e.g., as described herein, comprising a domain that includes a CAR polypeptide or portions thereof, the expression vector to be introduced into a cell can also contain either a selectable marker gene or a reporter gene or both to facilitate identification and selection of expressing cells from the population of cells sought to be transfected or infected through viral vectors. In other aspects, the selectable marker may be carried on a separate piece of DNA and used in a co-transfection procedure. Both selectable markers and reporter genes may be flanked with appropriate regulatory sequences to enable expression in the host cells. Useful selectable markers include, for example, antibiotic-resistance genes, such as neo and the like.

[1267] Reporter genes are used for identifying potentially transfected cells and for evaluating the functionality of regulatory sequences. In general, a reporter gene is a gene that is not present in or expressed by the recipient organism or tissue and that encodes a polypeptide whose expression is manifested by some easily detectable property, e.g., enzymatic activity. Expression of the reporter gene is assayed at a suitable time after the DNA has been introduced into the recipient cells. Suitable reporter genes may include genes encoding luciferase, beta-galactosidase, chloramphenicol acetyl transferase, secreted alkaline phosphatase, or the green fluorescent protein gene (e.g., Ui-Tei et al., 2000 FEBS Letters 479: 79-82). Suitable expression systems are well known and may be prepared using known techniques or obtained commercially. In general, the construct with the minimal 5′ flanking region showing the highest level of expression of reporter gene is identified as the promoter. Such promoter regions may be linked to a reporter gene and used to evaluate agents for the ability to modulate promoter-driven transcription.

[1268] In some embodiments, the vector comprising a nucleic acid sequence encoding a fusion polypeptide described herein, e.g., a fusion polypeptide comprising a CAR molecule described herein, can further comprise a second nucleic acid sequence encoding a polypeptide, e.g., an agent that increases the activity of the fusion polypeptide, e.g., as described herein, comprising a domain that includes CAR molecule. In some embodiments a single nucleic acid molecule, or vector comprising said nucleic acid molecule, encodes multiple fusion polypeptides, e.g., as described herein, each comprising domains that include a CAR, described herein. In some embodiments, the nucleic acid encoding a first fusion polypeptide is under separate regulatory control (e.g., by a promoter described herein) from the nucleic acid encoding a second fusion polypeptide (e.g., by a promoter described herein). In other embodiments, the two or more nucleic acid sequences are encoded by a single nucleic molecule in the same frame and as a single polypeptide chain. In this aspect, the two or more fusion polypeptides, e.g., as described herein, each comprising a domain that includes a CAR, can, e.g., be separated by one or more peptide cleavage sites (e.g., an auto-cleavage site or a substrate for an intracellular protease). Examples of peptide cleavage sites include the following, wherein the GSG residues are optional:

T2A:
(SEQ ID NO: 828)
(GSG)EGRGSLLTCGDVEENPGP
P2A:
(SEQ ID NO: 829)
(GSG)ATNFSLLKQAGDVEENPGP
E2A:
(SEQ ID NO: 830)
(GSG)QCTNYALLKLAGDVESNPGP
F2A:
(SEQ ID NO: 831)
(GSG)VKQTLNFDLLKLAGDVESNPGP

[1269] In some embodiments, the present disclosure provides, e.g., a nucleic acid molecule comprising a first nucleic acid sequence encoding a first molecule and a second nucleic acid sequence encoding a second molecule. In some embodiments, the first molecule is a first fusion polypeptide comprising a first COF1/CRBN-, COF2/CRBN-, or COF3/CRBN-binding polypeptide and a first heterologous polypeptide (e.g., a first CAR molecule) and/or the second molecule is a second fusion polypeptide comprising a second COF1/CRBN-, COF2/CRBN-, or COF3/CRBN-binding polypeptide and a second heterologous polypeptide (e.g., a second CAR molecule). In some embodiments, the first and second nucleic acid sequences are disposed on a single nucleic acid molecule. In some embodiments, the first and second nucleic acid sequences are disposed on separate nucleic acid molecules. In some embodiments, the first CAR molecule binds to CD19 (e.g., the first CAR molecule is an anti-CD19 CAR disclosed in Tables 5, 6, 7 and 30) and the second CAR molecule binds to CD22 (e.g., the second CAR molecule is an anti-CD22 CAR disclosed in Tables 19 and 20). In some embodiments, the first CAR molecule binds to CD19 (e.g., the first CAR molecule is an anti-CD19 CAR disclosed in Tables 5, 6, 7 and 30) and the second CAR molecule binds to CD20 (e.g., the second CAR molecule is an anti-CD20 CAR disclosed in Table 32). In embodiments, the nucleic acid molecule comprises RNA or DNA. In embodiments, the first and second nucleic acid sequences are situated in the same orientation, e.g., transcription of the first and second nucleic acid sequences proceeds in the same direction. In embodiments, the first and second nucleic acid sequences are situated in different orientations. In embodiments, a single promoter controls expression of the first and second nucleic acid sequences. In embodiments, a nucleic acid encoding a protease cleavage site (such as a T2A, P2A, E2A, or F2A cleavage site) is situated between the first and second nucleic acid sequences. In embodiments, the protease cleavage site is placed such that a cell can express a fusion protein comprising the first molecule and the second molecule, which protein is subsequently processed into two peptides by proteolytic cleavage. In some embodiments, the first nucleic acid sequence is upstream of the second nucleic acid sequence, or the second nucleic acid sequence is upstream of the first nucleic acid sequence. In embodiments, a first promoter controls expression of the first nucleic acid sequence and a second promoter controls expression of the second nucleic acid sequence. In embodiments, the nucleic acid molecule is a plasmid. In embodiments, the nucleic acid molecule comprises a viral packaging element. In some aspects, the present disclosure provides a cell, e.g., an immune effector cell, comprising the nucleic acid molecule described herein, e.g., a nucleic acid molecule comprising the first and second nucleic acid sequences described above. The cell may comprise a protease (e.g., endogenous or exogenous) that cleaves a T2A, P2A, E2A, or F2A cleavage site.

[1270] Methods of introducing and expressing genes into a cell are known in the art. In the context of an expression vector, the vector can be readily introduced into a host cell, e.g., mammalian, bacterial, yeast, or insect cell by any method in the art. For example, the expression vector can be transferred into a host cell by physical, chemical, or biological means.

[1271] Physical methods for introducing a polynucleotide into a host cell include calcium phosphate precipitation, lipofection, particle bombardment, microinjection, electroporation, and the like. Methods for producing cells comprising vectors and/or exogenous nucleic acids are well-known in the art. See, for example, Sambrook et al., 2012, MOLECULAR CLONING: A LABORATORY MANUAL, volumes 1-4, Cold Spring Harbor Press, NY). A preferred method for the introduction of a polynucleotide into a host cell is calcium phosphate transfection or electroporation.

[1272] Biological methods for introducing a polynucleotide of interest into a host cell include the use of DNA and RNA vectors. Viral vectors, and especially retroviral vectors, have become the most widely used method for inserting genes into mammalian, e.g., human cells. Other viral vectors can be derived from lentivirus, poxviruses, herpes simplex virus I, adenoviruses and adeno-associated viruses, and the like. See, for example, U.S. Pat. Nos. 5,350,674 and 5,585,362.

[1273] Chemical means for introducing a polynucleotide into a host cell include colloidal dispersion systems, such as macromolecule complexes, nanocapsules, microspheres, beads, and lipid-based systems including oil-in-water emulsions, micelles, mixed micelles, and liposomes. An exemplary colloidal system for use as a delivery vehicle in vitro and in vivo is a liposome (e.g., an artificial membrane vesicle). Other methods of state-of-the-art targeted delivery of nucleic acids are available, such as delivery of polynucleotides with targeted nanoparticles or other suitable sub-micron sized delivery system.

[1274] In the case where a non-viral delivery system is utilized, an exemplary delivery vehicle is a liposome. The use of lipid formulations is contemplated for the introduction of the nucleic acids into a host cell (in vitro, ex vivo or in vivo). In another aspect, the nucleic acid may be associated with a lipid. The nucleic acid associated with a lipid may be encapsulated in the aqueous interior of a liposome, interspersed within the lipid bilayer of a liposome, attached to a liposome via a linking molecule that is associated with both the liposome and the oligonucleotide, entrapped in a liposome, complexed with a liposome, dispersed in a solution containing a lipid, mixed with a lipid, combined with a lipid, contained as a suspension in a lipid, contained or complexed with a micelle, or otherwise associated with a lipid. Lipid, lipid/DNA or lipid/expression vector associated compositions are not limited to any particular structure in solution. For example, they may be present in a bilayer structure, as micelles, or with a “collapsed” structure. They may also simply be interspersed in a solution, possibly forming aggregates that are not uniform in size or shape. Lipids are fatty substances which may be naturally occurring or synthetic lipids. For example, lipids include the fatty droplets that naturally occur in the cytoplasm as well as the class of compounds which contain long-chain aliphatic hydrocarbons and their derivatives, such as fatty acids, alcohols, amines, amino alcohols, and aldehydes.

[1275] Lipids suitable for use can be obtained from commercial sources. For example, dimyristyl phosphatidylcholine (“DMPC”) can be obtained from Sigma, St. Louis, MO; dicetyl phosphate (“DCP”) can be obtained from K & K Laboratories (Plainview, NY); cholesterol (“Choi”) can be obtained from Calbiochem-Behring; dimyristyl phosphatidylglycerol (“DMPG”) and other lipids may be obtained from Avanti Polar Lipids, Inc. (Birmingham, AL.). Stock solutions of lipids in chloroform or chloroform/methanol can be stored at about −20° C. Chloroform is used as the only solvent since it is more readily evaporated than methanol. “Liposome” is a generic term encompassing a variety of single and multilamellar lipid vehicles formed by the generation of enclosed lipid bilayers or aggregates. Liposomes can be characterized as having vesicular structures with a phospholipid bilayer membrane and an inner aqueous medium. Multilamellar liposomes have multiple lipid layers separated by aqueous medium. They form spontaneously when phospholipids are suspended in an excess of aqueous solution. The lipid components undergo self-rearrangement before the formation of closed structures and entrap water and dissolved solutes between the lipid bilayers (Ghosh et al., 1991 Glycobiology 5: 505-10). However, compositions that have different structures in solution than the normal vesicular structure are also encompassed. For example, the lipids may assume a micellar structure or merely exist as nonuniform aggregates of lipid molecules. Also contemplated are lipofectamine-nucleic acid complexes.

[1276] Regardless of the method used to introduce exogenous nucleic acids into a host cell or otherwise expose a cell to the inhibitor of the present disclosure, in order to confirm the presence of the recombinant DNA sequence in the host cell, a variety of assays may be performed. Such assays include, for example, “molecular biological” assays well known to those of skill in the art, such as Southern and Northern blotting, RT-PCR and PCR; “biochemical” assays, such as detecting the presence or absence of a particular peptide, e.g., by immunological means (ELISAs and Western blots) or by assays described herein to identify agents falling within the scope of the invention.

[1277] The present disclosure further provides a vector comprising a fusion polypeptide, e.g., as described herein, comprising a domain that includes a CAR, -encoding nucleic acid molecule. In one embodiment, the vector comprises a CAR encoding nucleic acid molecule, e.g., as described herein. In one embodiment, the vector comprises two CAR encoding nucleic acid molecules. In one aspect, the one or more CAR vectors (e.g., the vector comprising a first CAR encoding nucleic acid molecule and the vector comprising a second CAR encoding nucleic acid molecule, or the vector comprising both a first and second CAR encoding nucleic acids) can be directly transduced into a cell, e.g., a T cell or a NK cell. In one aspect, the vector is a cloning or expression vector, e.g., a vector including, but not limited to, one or more plasmids (e.g., expression plasmids, cloning vectors, minicircles, minivectors, double minute chromosomes), retroviral and lentiviral vector constructs. In one aspect, the vector is capable of expressing the CAR construct in mammalian immune effector cells (e.g., T cells, NK cells).

[1278] In one embodiment, where stable expression of one or more (e.g., one or two) fusion polypeptides, e.g., as described herein, each comprising a domain that includes a CAR, is desired, a vector comprising one or more (e.g., one or two) CAR-encoding nucleic acid molecules is transduced into an immune effector cell. For example, immune effector cells with stable expression of two fusion polypeptides, e.g., as described herein, each comprising a domain that include a CAR, can be generated using lentiviral vectors. Cells that exhibit stable expression of two fusion polypeptides, e.g., as described herein, each comprising a domain that includes a CAR, express the CARs for at least 1 week, 2 weeks, 3 weeks, 4 weeks, 5 weeks, 6 weeks, 7 weeks, 8 weeks, 3 months, 6 months, 9 months, or 12 months after transduction.

[1279] In one embodiment, where transient expression of one or more (e.g., one or two) fusion polypeptides, e.g., as described herein, comprising a domain that includes a CAR is desired, one or more (e.g., one or two) fusion polypeptide-encoding nucleic acid molecules are transfected into an immune effector cell. The one or more (e.g., one or two) fusion polypeptides, e.g., as described herein, comprising a domain that includes a CAR, -encoding nucleic acid molecules may be a vector comprising a one or more (e.g., one or two) CAR encoding nucleic acid molecules, or an in vitro transcribed RNA one or more (e.g., one or two) CARs. In vitro transcribed RNA CARs and methods for transfection into immune effector cells are further described below. Cells that exhibit transient expression of a one or more (e.g., one or two) CAR express the one or more (e.g., one or two) CAR for 4, 5, 6, 7, 8, 9, 10, 11, 12, 13, 14, 15 days after transfection.

### RNA Transfection

[1280] Disclosed herein are methods for producing an in vitro transcribed RNA encoding a fusion polypeptide, e.g., as described herein, comprising a domain that includes a CAR. The present disclosure also includes a fusion polypeptide, e.g., as described herein, comprising a domain that includes CAR, -encoding RNA construct that can be directly transfected into a cell. A method for generating mRNA for use in transfection can involve in vitro transcription (IVT) of a template with specially designed primers, followed by polyA addition, to produce a construct containing 3′ and 5′ untranslated sequence (“UTR”), a 5′ cap and/or Internal Ribosome Entry Site (IRES), the nucleic acid to be expressed, and a polyA tail, typically 50-5000 bases in length (SEQ ID NO: 174). RNA so produced can efficiently transfect different kinds of cells. In one aspect, the template includes sequences for the CAR.

[1281] In one aspect, a fusion polypeptide, e.g., as described herein, comprising a domain that includes a CAR, of the present disclosure is encoded by a messenger RNA (mRNA). In one aspect, the mRNA encoding a CAR described herein is introduced into a T cell or a NK cell.

[1282] In one embodiment, the in vitro transcribed RNA encoding a fusion polypeptide, e.g., as described herein, comprising a domain that includes a CAR can be introduced to a cell as a form of transient transfection. The RNA is produced by in vitro transcription using a polymerase chain reaction (PCR)-generated template. DNA of interest from any source can be directly converted by PCR into a template for in vitro mRNA synthesis using appropriate primers and RNA polymerase. The source of the DNA can be, for example, genomic DNA, plasmid DNA, phage DNA, cDNA, synthetic DNA sequence or any other appropriate source of DNA. The desired template for in vitro transcription is a fusion polypeptide, e.g., as described herein, comprising a domain that includes a CAR, described herein. For example, the template for the RNA CAR comprises an extracellular region comprising a single chain variable domain of an antibody to an antigen described herein; a hinge region (e.g., a hinge region described herein), a transmembrane domain (e.g., a transmembrane domain described herein such as a transmembrane domain of CD8a); and a cytoplasmic region that includes an intracellular signaling domain, e.g., an intracellular signaling domain described herein, e.g., comprising the signaling domain of CD3-zeta and the signaling domain of 4-1BB.

[1283] In one embodiment, the DNA to be used for PCR contains an open reading frame. The DNA can be from a naturally occurring DNA sequence from the genome of an organism. In one embodiment, the nucleic acid can include some or all of the 5′ and/or 3′ untranslated regions (UTRs). The nucleic acid can include exons and introns. In one embodiment, the DNA to be used for PCR is a human nucleic acid sequence. In another embodiment, the DNA to be used for PCR is a human nucleic acid sequence including the 5′ and 3′ UTRs. The DNA can alternatively be an artificial DNA sequence that is not normally expressed in a naturally occurring organism. An exemplary artificial DNA sequence is one that contains portions of genes that are ligated together to form an open reading frame that encodes a fusion polypeptide. The portions of DNA that are ligated together can be from a single organism or from more than one organism.

[1284] PCR is used to generate a template for in vitro transcription of mRNA which is used for transfection. Methods for performing PCR are well known in the art. Primers for use in PCR are designed to have regions that are substantially complementary to regions of the DNA to be used as a template for the PCR. “Substantially complementary,” as used herein, refers to sequences of nucleotides where a majority or all of the bases in the primer sequence are complementary, or one or more bases are non-complementary, or mismatched. Substantially complementary sequences are able to anneal or hybridize with the intended DNA target under annealing conditions used for PCR. The primers can be designed to be substantially complementary to any portion of the DNA template. For example, the primers can be designed to amplify the portion of a nucleic acid that is normally transcribed in cells (the open reading frame), including 5′ and 3′ UTRs. The primers can also be designed to amplify a portion of a nucleic acid that encodes a particular domain of interest. In one embodiment, the primers are designed to amplify the coding region of a human cDNA, including all or portions of the 5′ and 3′ UTRs. Primers useful for PCR can be generated by synthetic methods that are well known in the art. “Forward primers” are primers that contain a region of nucleotides that are substantially complementary to nucleotides on the DNA template that are upstream of the DNA sequence that is to be amplified. “Upstream” is used herein to refer to a location 5, to the DNA sequence to be amplified relative to the coding strand. “Reverse primers” are primers that contain a region of nucleotides that are substantially complementary to a double-stranded DNA template that are downstream of the DNA sequence that is to be amplified. “Downstream” is used herein to refer to a location 3′ to the DNA sequence to be amplified relative to the coding strand.

[1285] Any DNA polymerase useful for PCR can be used in the methods disclosed herein. The reagents and polymerase are commercially available from a number of sources.

[1286] Chemical structures with the ability to promote stability and/or translation efficiency may also be used. The RNA preferably has 5′ and 3′ UTRs. In one embodiment, the 5′ UTR is between one and 3000 nucleotides in length. The length of 5′ and 3′ UTR sequences to be added to the coding region can be altered by different methods, including, but not limited to, designing primers for PCR that anneal to different regions of the UTRs. Using this approach, one of ordinary skill in the art can modify the 5′ and 3′ UTR lengths required to achieve optimal translation efficiency following transfection of the transcribed RNA.

[1287] The 5′ and 3′ UTRs can be the naturally occurring, endogenous 5′ and 3′ UTRs for the nucleic acid of interest. Alternatively, UTR sequences that are not endogenous to the nucleic acid of interest can be added by incorporating the UTR sequences into the forward and reverse primers or by any other modifications of the template. The use of UTR sequences that are not endogenous to the nucleic acid of interest can be useful for modifying the stability and/or translation efficiency of the RNA. For example, it is known that AU-rich elements in 3′ UTR sequences can decrease the stability of mRNA. Therefore, 3′ UTRs can be selected or designed to increase the stability of the transcribed RNA based on properties of UTRs that are well known in the art.

[1288] In one embodiment, the 5′ UTR can contain the Kozak sequence of the endogenous nucleic acid. Alternatively, when a 5′ UTR that is not endogenous to the nucleic acid of interest is being added by PCR as described above, a consensus Kozak sequence can be redesigned by adding the 5′ UTR sequence. Kozak sequences can increase the efficiency of translation of some RNA transcripts, but does not appear to be required for all RNAs to enable efficient translation. The requirement for Kozak sequences for many mRNAs is known in the art. In other embodiments the 5′ UTR can be 5′UTR of an RNA virus whose RNA genome is stable in cells. In other embodiments various nucleotide analogues can be used in the 3′ or 5′ UTR to impede exonuclease degradation of the mRNA.

[1289] To enable synthesis of RNA from a DNA template without the need for gene cloning, a promoter of transcription should be attached to the DNA template upstream of the sequence to be transcribed. When a sequence that functions as a promoter for an RNA polymerase is added to the 5′ end of the forward primer, the RNA polymerase promoter becomes incorporated into the PCR product upstream of the open reading frame that is to be transcribed. In one preferred embodiment, the promoter is a T7 polymerase promoter, as described elsewhere herein. Other useful promoters include, but are not limited to, T3 and SP6 RNA polymerase promoters. Consensus nucleotide sequences for T7, T3 and SP6 promoters are known in the art.

[1290] In a preferred embodiment, the mRNA has both a cap on the 5′ end and a 3′ poly(A) tail which determine ribosome binding, initiation of translation and stability mRNA in the cell. On a circular DNA template, for instance, plasmid DNA, RNA polymerase produces a long concatameric product which is not suitable for expression in eukaryotic cells. The transcription of plasmid DNA linearized at the end of the 3′ UTR results in normal sized mRNA which is not effective in eukaryotic transfection even if it is polyadenylated after transcription.

[1291] On a linear DNA template, phage T7 RNA polymerase can extend the 3′ end of the transcript beyond the last base of the template (Schenborn and Mierendorf, Nuc Acids Res., 13:6223-36 (1985); Nacheva and Berzal-Herranz, Eur. J. Biochem., 270:1485-65 (2003).

[1292] The conventional method of integration of polyA/T stretches into a DNA template is molecular cloning. However polyA/T sequence integrated into plasmid DNA can cause plasmid instability, which is why plasmid DNA templates obtained from bacterial cells are often highly contaminated with deletions and other aberrations. This makes cloning procedures not only laborious and time consuming but often not reliable. That is why a method which allows construction of DNA templates with polyA/T 3′ stretch without cloning highly desirable.

[1293] The polyA/T segment of the transcriptional DNA template can be produced during PCR by using a reverse primer containing a polyT tail, such as 100T tail (SEQ ID NO: 832) (size can be 50-5000 T (SEQ ID NO: 833)), or after PCR by any other method, including, but not limited to, DNA ligation or in vitro recombination. Poly(A) tails also provide stability to RNAs and reduce their degradation. Generally, the length of a poly(A) tail positively correlates with the stability of the transcribed RNA. In one embodiment, the poly(A) tail is between 100 and 5000 adenosines (SEQ ID NO: 834).

[1294] Poly(A) tails of RNAs can be further extended following in vitro transcription with the use of a poly(A) polymerase, such as E. coli polyA polymerase (E-PAP). In one embodiment, increasing the length of a poly(A) tail from 100 nucleotides to between 300 and 400 nucleotides (SEQ ID NO: 835) results in about a two-fold increase in the translation efficiency of the RNA. Additionally, the attachment of different chemical groups to the 3′ end can increase mRNA stability. Such attachment can contain modified/artificial nucleotides, aptamers and other compounds. For example, ATP analogs can be incorporated into the poly(A) tail using poly(A) polymerase. ATP analogs can further increase the stability of the RNA.

[1295] 5′ caps on also provide stability to RNA molecules. In a preferred embodiment, RNAs produced by the methods disclosed herein include a 5′ cap. The 5′ cap is provided using techniques known in the art and described herein (Cougot, et al., Trends in Biochem. Sci., 29:436-444 (2001); Stepinski, et al., RNA, 7:1468-95 (2001); Elango, et al., Biochim. Biophys. Res. Commun., 330:958-966 (2005)).

[1296] The RNAs produced by the methods disclosed herein can also contain an internal ribosome entry site (IRES) sequence. The IRES sequence may be any viral, chromosomal or artificially designed sequence which initiates cap-independent ribosome binding to mRNA and facilitates the initiation of translation. Any solutes suitable for cell electroporation, which can contain factors facilitating cellular permeability and viability such as sugars, peptides, lipids, proteins, antioxidants, and surfactants can be included.

[1297] RNA can be introduced into target cells using any of a number of different methods, for instance, commercially available methods which include, but are not limited to, electroporation (Amaxa Nucleofector-II (Amaxa Biosystems, Cologne, Germany)), (ECM 830 (BTX) (Harvard Instruments, Boston, Mass.) or the Gene Pulser II (BioRad, Denver, Colo.), Multiporator (Eppendort, Hamburg Germany), cationic liposome mediated transfection using lipofection, polymer encapsulation, peptide mediated transfection, or biolistic particle delivery systems such as “gene guns” (see, for example, Nishikawa, et al. Hum Gene Ther., 12(8):861-70 (2001).

### Non-Viral Delivery Methods

[1298] In some aspects, non-viral methods can be used to deliver a nucleic acid encoding a chimeric molecule or fusion polypeptide described herein into a cell or tissue or a subject.

[1299] In some embodiments, the non-viral method includes the use of a transposon (also called a transposable element). In some embodiments, a transposon is a piece of DNA that can insert itself at a location in a genome, for example, a piece of DNA that is capable of self-replicating and inserting its copy into a genome, or a piece of DNA that can be spliced out of a longer nucleic acid and inserted into another place in a genome. For example, a transposon comprises a DNA sequence made up of inverted repeats flanking genes for transposition.

[1300] In some embodiments, cells, e.g., T or NK cells, are generated that express a chimeric molecule or fusion polypeptide, e.g., as described herein, by using a combination of gene insertion using the SBTS and genetic editing using a nuclease (e.g., Zinc finger nucleases (ZFNs), Transcription Activator-Like Effector Nucleases (TALENs), the CRISPR/Cas system, or engineered meganuclease re-engineered homing endonucleases).

[1301] In some embodiments, use of a non-viral method of delivery permits reprogramming of cells, e.g., T or NK cells, and direct infusion of the cells into a subject. Advantages of non-viral vectors include but are not limited to the ease and relatively low cost of producing sufficient amounts required to meet a patient population, stability during storage, and lack of immunogenicity.

### Cells

[1302] Also provided herein are cells, e.g., immune effector cells (e.g., a population of cells, e.g., a population of immune effector cells) comprising a nucleic acid molecule, a fusion polypeptide molecule, or a vector, e.g., as described herein. In some embodiments, the provided cells comprise a fusion polypeptide, e.g., as described herein, comprising a domain that includes a CAR, a nucleic acid molecule encoding a fusion polypeptide comprising a domain that includes a CAR, or a vector comprising the same.

[1303] In certain aspects, immune effector cells, e.g., T cells or NK cells, can be obtained from a unit of blood collected from a subject using any number of techniques known to the skilled artisan, such as Ficoll™ separation. In one preferred aspect, cells from the circulating blood of an individual are obtained by apheresis. The apheresis product typically contains lymphocytes, including T cells, monocytes, granulocytes, B cells, other nucleated white blood cells, red blood cells, and platelets. In one aspect, the cells collected by apheresis may be washed to remove the plasma fraction and, optionally, to place the cells in an appropriate buffer or media for subsequent processing steps. In one embodiment, the cells are washed with phosphate buffered saline (PBS). In an alternative embodiment, the wash solution lacks calcium and may lack magnesium or may lack many if not all divalent cations.

[1304] Initial activation steps in the absence of calcium can lead to magnified activation. As those of ordinary skill in the art would readily appreciate a washing step may be accomplished by methods known to those in the art, such as by using a semi-automated “flow-through” centrifuge (for example, the Cobe 2991 cell processor, the Baxter CytoMate, or the Haemonetics Cell Saver 5) according to the manufacturer's instructions. After washing, the cells may be resuspended in a variety of biocompatible buffers, such as, for example, Ca-free, Mg-free PBS, PlasmaLyte A, or other saline solution with or without buffer. Alternatively, the undesirable components of the apheresis sample may be removed and the cells directly resuspended in culture media.

[1305] It is recognized that the methods of the application can utilize culture media conditions comprising 5% or less, for example 2%, human AB serum, and employ known culture media conditions and compositions, for example those described in Smith et al., “Ex vivo expansion of human T cells for adoptive immunotherapy using the novel Xeno-free CTS Immune Cell Serum Replacement” Clinical & Translational Immunology (2015) 4, e31; doi:10.1038/cti.2014.31.

[1306] In one aspect, T cells are isolated from peripheral blood lymphocytes by lysing the red blood cells and depleting the monocytes, for example, by centrifugation through a PERCOLL™ gradient or by counterflow centrifugal elutriation.

[1307] The methods described herein can include, e.g., selection of a specific subpopulation of immune effector cells, e.g., T cells, that are a T regulatory cell-depleted population, CD25+ depleted cells, using, e.g., a negative selection technique, e.g., described herein. Preferably, the population of T regulatory depleted cells contains less than 30%, 25%, 20%, 15%, 10%, 5%, 4%, 3%, 2%, 1% of CD25+ cells.

[1308] In one embodiment, T regulatory cells, e.g., CD25+ T cells, are removed from the population using an anti-CD25 antibody, or fragment thereof, or a CD25-binding ligand, IL-2. In one embodiment, the anti-CD25 antibody, or fragment thereof, or CD25-binding ligand is conjugated to a substrate, e.g., a bead, or is otherwise coated on a substrate, e.g., a bead. In one embodiment, the anti-CD25 antibody, or fragment thereof, is conjugated to a substrate as described herein.

[1309] In one embodiment, the T regulatory cells, e.g., CD25+ T cells, are removed from the population using CD25 depletion reagent from Miltenyi™. In one embodiment, the ratio of cells to CD25 depletion reagent is 1e7 cells to 20 uL, or 1e7 cells to 15 uL, or 1e7 cells to 10 uL, or 1e7 cells to 5 uL, or 1e7 cells to 2.5 uL, or 1e7 cells to 1.25 uL. In one embodiment, e.g., for T regulatory cells, e.g., CD25+ depletion, greater than 500 million cells/ml is used. In a further aspect, a concentration of cells of 600, 700, 800, or 900 million cells/ml is used.

[1310] In one embodiment, the population of immune effector cells to be depleted includes about 6×10⁹ CD25+ T cells. In other aspects, the population of immune effector cells to be depleted include about 1×10⁹ to 1×10¹⁰ CD25+ T cell, and any integer value in between. In one embodiment, the resulting population T regulatory depleted cells has 2×10⁹ T regulatory cells, e.g., CD25+ cells, or less (e.g., 1×10⁹, 5×10⁸, 1×10⁸, 5×10⁷, 1×10⁷, or less CD25+ cells).

[1311] In one embodiment, the T regulatory cells, e.g., CD25+ cells, are removed from the population using the CliniMAC system with a depletion tubing set, such as, e.g., tubing 162-01. In one embodiment, the CliniMAC system is run on a depletion setting such as, e.g., DEPLETION2.1.

[1312] Without wishing to be bound by a particular theory, decreasing the level of negative regulators of immune cells (e.g., decreasing the number of unwanted immune cells, e.g., TREG cells), in a subject prior to apheresis or during manufacturing of a fusion polypeptide, e.g., as described herein, comprising a domain that includes a CAR, -expressing cell product can reduce the risk of subject relapse. For example, methods of depleting TREG cells are known in the art. Methods of decreasing TREG cells include, but are not limited to, cyclophosphamide, anti-GITR antibody (an anti-GITR antibody described herein), CD25-depletion, and combinations thereof.

[1313] In some embodiments, the manufacturing methods comprise reducing the number of (e.g., depleting) TREG cells prior to manufacturing of the fusion polypeptide, e.g., as described herein, comprising a domain that includes a CAR, -expressing cell. For example, manufacturing methods comprise contacting the sample, e.g., the apheresis sample, with an anti-GITR antibody and/or an anti-CD25 antibody (or fragment thereof, or a CD25-binding ligand), e.g., to deplete TREG cells prior to manufacturing of the CAR-expressing cell (e.g., T cell, NK cell) product.

[1314] In an embodiment, a subject is pre-treated with one or more therapies that reduce TREG cells prior to collection of cells for fusion polypeptide, e.g., as described herein, comprising a domain that includes a CAR, -expressing cell product manufacturing, thereby reducing the risk of subject relapse to fusion polypeptide, e.g., as described herein, comprising a domain that includes a CAR, -expressing cell treatment. In an embodiment, methods of decreasing TREG cells include, but are not limited to, administration to the subject of one or more of cyclophosphamide, anti-GITR antibody, CD25-depletion, or a combination thereof. Administration of one or more of cyclophosphamide, anti-GITR antibody, CD25-depletion, or a combination thereof, can occur before, during or after an infusion of the CAR-expressing cell product.

[1315] In an embodiment, a subject is pre-treated with cyclophosphamide prior to collection of cells for CAR-expressing cell product manufacturing, thereby reducing the risk of subject relapse to fusion polypeptide, e.g., as described herein, comprising a domain that includes a CAR, -expressing cell treatment. In an embodiment, a subject is pre-treated with an anti-GITR antibody prior to collection of cells for CAR-expressing cell product manufacturing, thereby reducing the risk of subject relapse to CAR-expressing cell treatment.

[1316] In one embodiment, the population of cells to be removed are neither the regulatory T cells or tumor cells, but cells that otherwise negatively affect the expansion and/or function of CART cells, e.g. cells expressing CD14, CD11b, CD33, CD15, or other markers expressed by potentially immune suppressive cells. In one embodiment, such cells are envisioned to be removed concurrently with regulatory T cells and/or tumor cells, or following said depletion, or in another order.

[1317] The methods described herein can include more than one selection step, e.g., more than one depletion step. Enrichment of a T cell population by negative selection can be accomplished, e.g., with a combination of antibodies directed to surface markers unique to the negatively selected cells. One method is cell sorting and/or selection via negative magnetic immunoadherence or flow cytometry that uses a cocktail of monoclonal antibodies directed to cell surface markers present on the cells negatively selected. For example, to enrich for CD4+ cells by negative selection, a monoclonal antibody cocktail can include antibodies to CD14, CD20, CD11b, CD16, HLA-DR, and CD8.

[1318] The methods described herein can further include removing cells from the population which express a tumor antigen, e.g., a tumor antigen that does not comprise CD25, e.g., CD19, CD30, CD38, CD123, CD20, CD14 or CD11b, to thereby provide a population of T regulatory depleted, e.g., CD25+ depleted, and tumor antigen depleted cells that are suitable for expression of a fusion polypeptide, e.g., as described herein, comprising a domain that includes a CAR, e.g., a CAR described herein. In one embodiment, tumor antigen expressing cells are removed simultaneously with the T regulatory, e.g., CD25+ cells. For example, an anti-CD25 antibody, or fragment thereof, and an anti-tumor antigen antibody, or fragment thereof, can be attached to the same substrate, e.g., bead, which can be used to remove the cells or an anti-CD25 antibody, or fragment thereof, or the anti-tumor antigen antibody, or fragment thereof, can be attached to separate beads, a mixture of which can be used to remove the cells. In other embodiments, the removal of T regulatory cells, e.g., CD25+ cells, and the removal of the tumor antigen expressing cells is sequential, and can occur, e.g., in either order.

[1319] Also provided are methods that include removing cells from the population which express a check point inhibitor, e.g., a check point inhibitor described herein, e.g., one or more of PD1+ cells, LAG3+ cells, and TIM3+ cells, to thereby provide a population of T regulatory depleted, e.g., CD25+ depleted cells, and check point inhibitor depleted cells, e.g., PD1+, LAG3+ and/or TIM3+ depleted cells. Exemplary check point inhibitors include B7-H1, B7-1, CD160, P1H, 2B4, PD1, TIM3, CEACAM (e.g., CEACAM-1, CEACAM-3 and/or CEACAM-5), LAG3, TIGIT, CTLA-4, BTLA and LAIR1. In one embodiment, check point inhibitor expressing cells are removed simultaneously with the T regulatory, e.g., CD25+ cells. For example, an anti-CD25 antibody, or fragment thereof, and an anti-check point inhibitor antibody, or fragment thereof, can be attached to the same bead which can be used to remove the cells, or an anti-CD25 antibody, or fragment thereof, and the anti-check point inhibitor antibody, or fragment there, can be attached to separate beads, a mixture of which can be used to remove the cells. In other embodiments, the removal of T regulatory cells, e.g., CD25+ cells, and the removal of the check point inhibitor expressing cells is sequential, and can occur, e.g., in either order.

[1320] Methods described herein can include a positive selection step. For example, T cells can isolated by incubation with anti-CD3/anti-CD28 (e.g., 3×28)-conjugated beads, such as DYNABEADS®-M-450 CD3/CD28 T, for a time period sufficient for positive selection of the desired T cells. In one embodiment, the time period is about 30 minutes. In a further embodiment, the time period ranges from 30 minutes to 36 hours or longer and all integer values there between. In a further embodiment, the time period is at least 1, 2, 3, 4, 5, or 6 hours. In yet another embodiment, the time period is 10 to 24 hours, e.g., 24 hours. Longer incubation times may be used to isolate T cells in any situation where there are few T cells as compared to other cell types, such in isolating tumor infiltrating lymphocytes (TIL) from tumor tissue or from immunocompromised individuals. Further, use of longer incubation times can increase the efficiency of capture of CD8+ T cells. Thus, by simply shortening or lengthening the time T cells are allowed to bind to the CD3/CD28 beads and/or by increasing or decreasing the ratio of beads to T cells (as described further herein), subpopulations of T cells can be preferentially selected for or against at culture initiation or at other time points during the process. Additionally, by increasing or decreasing the ratio of anti-CD3 and/or anti-CD28 antibodies on the beads or other surface, subpopulations of T cells can be preferentially selected for or against at culture initiation or at other desired time points.

[1321] In one embodiment, a T cell population can be selected that expresses one or more of IFN-7, TNFα, IL-17A, IL-2, IL-3, IL-4, GM-CSF, IL-10, IL-13, granzyme B, and perforin, or other appropriate molecules, e.g., other cytokines. Methods for screening for cell expression can be determined, e.g., by the methods described in PCT Publication No.: WO 2013/126712.

[1322] For isolation of a desired population of cells by positive or negative selection, the concentration of cells and surface (e.g., particles such as beads) can be varied. In certain aspects, it may be desirable to significantly decrease the volume in which beads and cells are mixed together (e.g., increase the concentration of cells), to ensure maximum contact of cells and beads. For example, in one aspect, a concentration of 10 billion cells/ml, 9 billion/ml, 8 billion/ml, 7 billion/ml, 6 billion/ml, or 5 billion/ml is used. In one aspect, a concentration of 1 billion cells/ml is used. In yet one aspect, a concentration of cells from 75, 80, 85, 90, 95, or 100 million cells/ml is used. In further aspects, concentrations of 125 or 150 million cells/ml can be used.

[1323] Using high concentrations can result in increased cell yield, cell activation, and cell expansion. Further, use of high cell concentrations allows more efficient capture of cells that may weakly express target antigens of interest, such as CD28-negative T cells, or from samples where there are many tumor cells present (e.g., leukemic blood, tumor tissue, etc.). Such populations of cells may have therapeutic value and would be desirable to obtain. For example, using high concentration of cells allows more efficient selection of CD8+ T cells that normally have weaker CD28 expression.

[1324] In a related aspect, it may be desirable to use lower concentrations of cells. By significantly diluting the mixture of T cells and surface (e.g., particles such as beads), interactions between the particles and cells is minimized. This selects for cells that express high amounts of desired antigens to be bound to the particles. For example, CD4+ T cells express higher levels of CD28 and are more efficiently captured than CD8+ T cells in dilute concentrations. In one aspect, the concentration of cells used is 5×10⁶/ml. In other aspects, the concentration used can be from about 1×10⁵/ml to 1×10⁶/ml, and any integer value in between.

[1325] In other aspects, the cells may be incubated on a rotator for varying lengths of time at varying speeds at either 2-10° C. or at room temperature.

[1326] T cells for stimulation can also be frozen after a washing step. Wishing not to be bound by theory, the freeze and subsequent thaw step provides a more uniform product by removing granulocytes and to some extent monocytes in the cell population. After the washing step that removes plasma and platelets, the cells may be suspended in a freezing solution. While many freezing solutions and parameters are known in the art and will be useful in this context, one method involves using PBS containing 20% DMSO and 8% human serum albumin, or culture media containing 10% Dextran 40 and 5% Dextrose, 20% Human Serum Albumin and 7.5% DMSO, or 31.25% Plasmalyte-A, 31.25% Dextrose 5%, 0.45% NaCl, 10% Dextran 40 and 5% Dextrose, 20% Human Serum Albumin, and 7.5% DMSO or other suitable cell freezing media containing for example, Hespan and PlasmaLyte A, the cells then are frozen to −80° C. at a rate of 1° per minute and stored in the vapor phase of a liquid nitrogen storage tank. Other methods of controlled freezing may be used as well as uncontrolled freezing immediately at −20° C. or in liquid nitrogen.

[1327] In certain aspects, cryopreserved cells are thawed and washed as described herein and allowed to rest for one hour at room temperature prior to activation using the methods of the present invention.

[1328] Also contemplated in the context of the invention is the collection of blood samples or apheresis product from a subject at a time period prior to when the expanded cells as described herein might be needed. As such, the source of the cells to be expanded can be collected at any time point necessary, and desired cells, such as T cells, isolated and frozen for later use in immune effector cell therapy for any number of diseases or conditions that would benefit from immune effector cell therapy, such as those described herein. In one aspect a blood sample or an apheresis is taken from a generally healthy subject. In certain aspects, a blood sample or an apheresis is taken from a generally healthy subject who is at risk of developing a disease, but who has not yet developed a disease, and the cells of interest are isolated and frozen for later use. In certain aspects, the T cells may be expanded, frozen, and used at a later time. In certain aspects, samples are collected from a patient shortly after diagnosis of a particular disease as described herein but prior to any treatments. In a further aspect, the cells are isolated from a blood sample or an apheresis from a subject prior to any number of relevant treatment modalities, including but not limited to treatment with agents such as natalizumab, efalizumab, antiviral agents, chemotherapy, radiation, immunosuppressive agents, such as cyclosporin, azathioprine, methotrexate, mycophenolate, and FK506, antibodies, or other immunoablative agents such as CAMPATH, anti-CD3 antibodies, cytoxan, fludarabine, cyclosporin, FK506, rapamycin, mycophenolic acid, steroids, FR901228, and irradiation.

[1329] In a further aspect of the present invention, T cells are obtained from a patient directly following treatment that leaves the subject with functional T cells. In this regard, it has been observed that following certain cancer treatments, in particular treatments with drugs that damage the immune system, shortly after treatment during the period when patients would normally be recovering from the treatment, the quality of T cells obtained may be optimal or improved for their ability to expand ex vivo. Likewise, following ex vivo manipulation using the methods described herein, these cells may be in a preferred state for enhanced engraftment and in vivo expansion. Thus, it is contemplated within the context of the present disclosure to collect blood cells, including T cells, dendritic cells, or other cells of the hematopoietic lineage, during this recovery phase. Further, in certain aspects, mobilization (for example, mobilization with GM-CSF) and conditioning regimens can be used to create a condition in a subject wherein repopulation, recirculation, regeneration, and/or expansion of particular cell types is favored, especially during a defined window of time following therapy. Illustrative cell types include T cells, B cells, dendritic cells, and other cells of the immune system.

[1330] In one embodiment, the immune effector cells expressing a fusion polypeptide, e.g., as described herein, comprising a domain that includes a CAR molecule, e.g., a CAR molecule described herein, are obtained from a subject that has received a low, immune enhancing dose of an mTOR inhibitor. In an embodiment, the population of immune effector cells, e.g., T cells, to be engineered to express a CAR, are harvested after a sufficient time, or after sufficient dosing of the low, immune enhancing, dose of an mTOR inhibitor, such that the level of PD1 negative immune effector cells, e.g., T cells, or the ratio of PD1 negative immune effector cells, e.g., T cells/PD1 positive immune effector cells, e.g., T cells, in the subject or harvested from the subject has been, at least transiently, increased.

[1331] In other embodiments, population of immune effector cells, e.g., T cells, which have, or will be engineered to express a fusion protein, e.g., as described herein, comprising a domain that includes a CAR, can be treated ex vivo by contact with an amount of an mTOR inhibitor that increases the number of PD1 negative immune effector cells, e.g., T cells or increases the ratio of PD1 negative immune effector cells, e.g., T cells/PD1 positive immune effector cells, e.g., T cells.

[1332] In one embodiment, a T cell population is diaglycerol kinase (DGK)-deficient. DGK-deficient cells include cells that do not express DGK RNA or protein, or have reduced or inhibited DGK activity. DGK-deficient cells can be generated by genetic approaches, e.g., administering RNA-interfering agents, e.g., siRNA, shRNA, miRNA, to reduce or prevent DGK expression. Alternatively, DGK-deficient cells can be generated by treatment with DGK inhibitors described herein.

[1333] In one embodiment, a T cell population is Ikaros-deficient. Ikaros-deficient cells include cells that do not express Ikaros RNA or protein, or have reduced or inhibited Ikaros activity, Ikaros-deficient cells can be generated by genetic approaches, e.g., administering RNA-interfering agents, e.g., siRNA, shRNA, miRNA, to reduce or prevent Ikaros expression. Alternatively, Ikaros-deficient cells can be generated by treatment with Ikaros inhibitors, e.g., lenalidomide.

[1334] In embodiments, a T cell population is DGK-deficient and Ikaros-deficient, e.g., does not express DGK and Ikaros, or has reduced or inhibited DGK and Ikaros activity. Such DGK and Ikaros-deficient cells can be generated by any of the methods described herein.

[1335] In an embodiment, the NK cells are obtained from the subject. In another embodiment, the NK cells are an NK cell line, e.g., NK-92 cell line (Conkwest).

### Additional Expressed Agents

[1336] In another embodiment, a fusion polypeptide, e.g., as described herein, comprising a domain that includes a CAR, -expressing immune effector cell described herein can further express another agent, e.g., an agent which enhances the activity of a CAR-expressing cell. For example, in one embodiment, the agent can be an agent which inhibits an inhibitory molecule. Examples of inhibitory molecules include PD-1, PD-L1, CTLA-4, TIM-3, CEACAM (e.g., CEACAM-1, CEACAM-3 and/or CEACAM-5), LAG-3, VISTA, BTLA, TIGIT, LAIR1, CD160, 2B4 and TGFR beta, e.g., as described herein. In one embodiment, the agent that inhibits an inhibitory molecule comprises a first polypeptide, e.g., an inhibitory molecule, associated with a second polypeptide that provides a positive signal to the cell, e.g., an intracellular signaling domain described herein. In one embodiment, the agent comprises a first polypeptide, e.g., of an inhibitory molecule such as PD-1, PD-L1, CTLA-4, TIM-3, CEACAM (e.g., CEACAM-1, CEACAM-3 and/or CEACAM-5), LAG-3, VISTA, BTLA, TIGIT, LAIR1, CD160, 2B4 or TGFR beta, or a fragment of any of these, and a second polypeptide which is an intracellular signaling domain described herein (e.g., comprising a costimulatory domain (e.g., 41BB, CD27 or CD28, e.g., as described herein) and/or a primary signaling domain (e.g., a CD3 zeta signaling domain described herein). In one embodiment, the agent comprises a first polypeptide of PD-1 or a fragment thereof, and a second polypeptide of an intracellular signaling domain described herein (e.g., a CD28, CD27, OX40 or 4-IBB signaling domain described herein and/or a CD3 zeta signaling domain described herein).

[1337] In one embodiment, the fusion polypeptide, e.g., as described herein, comprising a domain that includes a CAR, -expressing immune effector cell described herein can further comprise a second fusion polypeptide, e.g., as described herein, comprising a domain that includes a CAR, e.g., a second CAR that includes a different antigen binding domain, e.g., to the same target (e.g., a target described above) or a different target. In one embodiment, the second CAR includes an antigen binding domain to a target expressed on the same cancer cell type as the target of the first CAR. In one embodiment, the CAR-expressing immune effector cell comprises a first CAR that targets a first antigen and includes an intracellular signaling domain having a costimulatory signaling domain but not a primary signaling domain, and a second CAR that targets a second, different, antigen and includes an intracellular signaling domain having a primary signaling domain but not a costimulatory signaling domain.

[1338] While not wishing to be bound by theory, placement of a costimulatory signaling domain, e.g., 4-1BB, CD28, CD27 or OX-40, onto the first CAR, and the primary signaling domain, e.g., CD3 zeta, on the second CAR can limit the CAR activity to cells where both targets are expressed. In one embodiment, the CAR expressing immune effector cell comprises a first CAR that includes an antigen binding domain that targets, e.g., a target described above, a transmembrane domain and a costimulatory domain and a second CAR that targets an antigen other than antigen targeted by the first CAR (e.g., an antigen expressed on the same cancer cell type as the first target) and includes an antigen binding domain, a transmembrane domain and a primary signaling domain. In another embodiment, the CAR expressing immune effector cell comprises a first CAR that includes an antigen binding domain that targets, e.g., a target described above, a transmembrane domain and a primary signaling domain and a second CAR that targets an antigen other than antigen targeted by the first CAR (e.g., an antigen expressed on the same cancer cell type as the first target) and includes an antigen binding domain to the antigen, a transmembrane domain and a costimulatory signaling domain.

[1339] In one embodiment, the CAR-expressing immune effector cell comprises a CAR described herein, e.g., a CAR to a target described above, and an inhibitory CAR. In one embodiment, the inhibitory CAR comprises an antigen binding domain that binds an antigen found on normal cells but not cancer cells, e.g., normal cells that also express the target. In one embodiment, the inhibitory CAR comprises the antigen binding domain, a transmembrane domain and an intracellular domain of an inhibitory molecule. For example, the intracellular domain of the inhibitory CAR can be an intracellular domain of PD1, PD-L1, CTLA-4, TIM-3, CEACAM (e.g., CEACAM-1, CEACAM-3 and/or CEACAM-5), LAG-3, VISTA, BTLA, TIGIT, LAIR1, CD160, 2B4 or TGFR beta.

[1340] In one embodiment, an immune effector cell (e.g., T cell, NK cell) comprises a first CAR comprising an antigen binding domain that binds to a tumor antigen as described herein, and a second CAR comprising a PD1 extracellular domain or a fragment thereof.

[1341] In one embodiment, the cell further comprises an inhibitory molecule as described above.

[1342] In one embodiment, the second CAR in the cell is an inhibitory CAR, wherein the inhibitory CAR comprises an antigen binding domain, a transmembrane domain, and an intracellular domain of an inhibitory molecule. The inhibitory molecule can be chosen from one or more of: PD1, PD-L1, CTLA-4, TIM-3, LAG-3, VISTA, BTLA, TIGIT, LAIR1, CD160, 2B4, TGFR beta, CEACAM-1, CEACAM-3, and CEACAM-5. In one embodiment, the second CAR molecule comprises the extracellular domain of PD1 or a fragment thereof.

[1343] In embodiments, the second CAR molecule in the cell further comprises an intracellular signaling domain comprising a primary signaling domain and/or an intracellular signaling domain.

[1344] In other embodiments, the intracellular signaling domain in the cell comprises a primary signaling domain comprising the functional domain of CD3 zeta and a costimulatory signaling domain comprising the functional domain of 4-1BB.

[1345] In certain embodiments, the antigen binding domain of the first CAR molecule comprises a scFv and the antigen binding domain of the second CAR molecule does not comprise a scFv. For example, the antigen binding domain of the first CAR molecule comprises a scFv and the antigen binding domain of the second CAR molecule comprises a camelid VHH domain.

### Split CAR

[1346] In some embodiments, the CAR-expressing cell uses a split CAR. The split CAR approach is described in more detail in publications WO2014/055442 and WO2014/055657, herein incorporated by reference. Briefly, a split CAR system comprises a cell expressing a first CAR having a first antigen binding domain and a costimulatory domain (e.g., 41BB), and the cell also expresses a second CAR having a second antigen binding domain and an intracellular signaling domain (e.g., CD3 zeta). When the cell encounters the first antigen, the costimulatory domain is activated, and the cell proliferates. When the cell encounters the second antigen, the intracellular signaling domain is activated and cell-killing activity begins. Thus, the CAR-expressing cell is only fully activated in the presence of both antigens.

### Multiple CAR Expression

[1347] In one aspect, the fusion polypeptide, e.g., as described herein, comprising a domain that includes a CAR, -expressing cell described herein can further comprise a second fusion polypeptide, e.g., as described herein, comprising a domain that includes a CAR, e.g., a second CAR that includes a different antigen binding domain, e.g., to the same target or a different target (e.g., a target other than a cancer associated antigen described herein or a different cancer associated antigen described herein). In one embodiment, the second CAR includes an antigen binding domain to a target expressed the same cancer cell type as the cancer associated antigen. In one embodiment, the CAR-expressing cell comprises a first CAR that targets a first antigen and includes an intracellular signaling domain having a costimulatory signaling domain but not a primary signaling domain, and a second CAR that targets a second, different, antigen and includes an intracellular signaling domain having a primary signaling domain but not a costimulatory signaling domain. While not wishing to be bound by theory, placement of a costimulatory signaling domain, e.g., 4-1BB, CD28, CD27 or OX-40, onto the first CAR, and the primary signaling domain, e.g., CD3 zeta, on the second CAR can limit the CAR activity to cells where both targets are expressed. In one embodiment, the CAR expressing cell comprises a first cancer associated antigen CAR that includes an antigen binding domain that binds a target antigen described herein, a transmembrane domain and a costimulatory domain and a second CAR that targets a different target antigen (e.g., an antigen expressed on that same cancer cell type as the first target antigen) and includes an antigen binding domain, a transmembrane domain and a primary signaling domain. In another embodiment, the CAR expressing cell comprises a first CAR that includes an antigen binding domain that binds a target antigen described herein, a transmembrane domain and a primary signaling domain and a second CAR that targets an antigen other than the first target antigen (e.g., an antigen expressed on the same cancer cell type as the first target antigen) and includes an antigen binding domain to the antigen, a transmembrane domain and a costimulatory signaling domain.

[1348] In some embodiments, the claimed invention comprises a first and second CAR, wherein the antigen binding domain of one of said first CAR said second CAR does not comprise a variable light domain and a variable heavy domain. In some embodiments, the antigen binding domain of one of said first CAR said second CAR is an scFv, and the other is not an scFv. In some embodiments, the antigen binding domain of one of said first CAR said second CAR comprises a single VH domain, e.g., a camelid, shark, or lamprey single VH domain, or a single VH domain derived from a human or mouse sequence. In some embodiments, the antigen binding domain of one of said first CAR said second CAR comprises a nanobody. In some embodiments, the antigen binding domain of one of said first CAR said second CAR comprises a camelid VHH domain.

### Allogeneic Cells

[1349] In embodiments described herein, the immune effector cell can be an allogeneic immune effector cell, e.g., T cell or NK cell. For example, the cell can be an allogeneic T cell, e.g., an allogeneic T cell lacking expression of a functional T cell receptor (TCR) and/or human leukocyte antigen (HLA), e.g., HLA class I and/or HLA class II or beta 2 microglobulin (B2M).

[1350] A T cell lacking a functional TCR can be, e.g., engineered such that it does not express any functional TCR on its surface, engineered such that it does not express one or more subunits that comprise a functional TCR, e.g., TRAC, TRBC1, TRBC2, CD3E, CD3G, or CD3D, or engineered such that it produces very little functional TCR on its surface. Alternatively, the T cell can express a substantially impaired TCR, e.g., by expression of mutated or truncated forms of one or more of the subunits of the TCR. The term “substantially impaired TCR” means that this TCR will not elicit an adverse immune reaction in a host.

[1351] A T cell described herein can be, e.g., engineered such that it does not express a functional HLA on its surface. For example, a T cell described herein, can be engineered such that cell surface expression HLA, e.g., HLA class 1 and/or HLA class II, or subunit or regulator of HLA expression, e.g., B2M, is downregulated.

[1352] A T cell described herein can be, e.g., engineered such that it does not express a functional B2M on its surface. For example, a T cell described herein, can be engineered such that cell surface expression of B2M is downregulated.

[1353] In some embodiments, the T cell can lack a functional TCR and a functional HLA, e.g., HLA class I and/or HLA class II.

[1354] Modified T cells that lack expression of a functional TCR and/or HLA can be obtained by any suitable means, including a knock out or knock down of one or more subunit of TCR or HLA. For example, the T cell can include a knock down of TCR and/or HLA using siRNA, shRNA, clustered regularly interspaced short palindromic repeats (CRISPR) transcription-activator like effector nuclease (TALEN), or zinc finger endonuclease (ZFN).

[1355] In some embodiments, the allogeneic cell can be a cell which does not express or expresses at low levels an inhibitory molecule, e.g. by any method described herein. For example, the cell can be a cell that does not express or expresses at low levels an inhibitory molecule, e.g., that can decrease the ability of a CAR-expressing cell to mount an immune effector response. Examples of inhibitory molecules include PD1, PD-L1, CTLA4, TIM3, CEACAM (e.g., CEACAM-1, CEACAM-3 and/or CEACAM-5), LAG3, VISTA, BTLA, TIGIT, LAIR1, CD160, 2B4 and TGFR beta. Inhibition of an inhibitory molecule, e.g., by inhibition at the DNA, RNA or protein level, can optimize a CAR-expressing cell performance. In embodiments, an inhibitory nucleic acid, e.g., an inhibitory nucleic acid, e.g., a dsRNA, e.g., an siRNA or shRNA, a clustered regularly interspaced short palindromic repeats (CRISPR), a transcription-activator like effector nuclease (TALEN), or a zinc finger endonuclease (ZFN), e.g., as described herein, can be used.

siRNA and shRNA

[1356] In some embodiments, TCR expression and/or HLA or B2M expression can be inhibited using siRNA or shRNA that targets a nucleic acid encoding a TCR and/or HLA in a T cell.

### CRISPR

[1357] “CRISPR” or “CRISPR to TCR and/or HLA” or “CRISPR to inhibit TCR and/or HLA” as used herein refers to a set of clustered regularly interspaced short palindromic repeats, or a system comprising such a set of repeats. “Cas”, as used herein, refers to a CRISPR-associated protein. A “CRISPR/Cas” system refers to a system derived from CRISPR and Cas which can be used to silence or mutate a TCR and/or HLA or B2M gene.

[1358] Artificial CRISPR/Cas systems can be generated which inhibit TCR and/or HLA, using technology known in the art, e.g., that described in U.S. Publication No. 20140068797, and Cong (2013) Science 339: 819-823, herein incorporated by reference in their entireties. Other artificial CRISPR/Cas systems that are known in the art may also be generated which inhibit TCR and/or HLA, e.g., that described in Tsai (2014) Nature Biotechnol., 32:6 569-576, U.S. Pat. Nos. 8,871,445; 8,865,406; 8,795,965; 8,771,945; and 8,697,359, herein incorporated by reference in their entireties.

### TALEN

[1359] “TALEN” or “TALEN to HLA and/or TCR” or “TALEN to inhibit HLA and/or TCR” refers to a transcription activator-like effector nuclease, an artificial nuclease which can be used to edit the HLA or B2M and/or TCR gene.

[1360] TALENs are produced artificially by fusing a TAL effector DNA binding domain to a DNA cleavage domain. Transcription activator-like effects (TALEs) can be engineered to bind any desired DNA sequence, including a portion of the HLA or TCR gene. By combining an engineered TALE with a DNA cleavage domain, a restriction enzyme can be produced which is specific to any desired DNA sequence, including a HLA or TCR sequence. These can then be introduced into a cell, wherein they can be used for genome editing, as described in Boch (2011) Nature Biotech. 29: 135-6; Boch et al. (2009) Science 326: 1509-12; and Moscou et al. (2009) Science 326: 3501, herein incorporated by reference in their entireties.

[1361] TALENs specific to sequences in HLA or TCR can be constructed using any method known in the art, including various schemes using modular components, as described in Zhang et al. (2011) Nature Biotech. 29: 149-53; and Geibler et al. (2011) PLoS ONE 6: e19509, herein incorporated by reference in their entireties.

Zinc Finger Nuclease to Inhibit HLA and/or TCR

[1362] “ZFN” or “Zinc Finger Nuclease” or “ZFN to HLA and/or TCR” or “ZFN to inhibit HLA and/or TCR” refer to a zinc finger nuclease, an artificial nuclease which can be used to edit the HLA and/or TCR or B2M gene.

[1363] ZFNs specific to sequences in HLA AND/OR TCR can be constructed using any method known in the art, as described in Provasi (2011) Nature Med. 18: 807-815; Torikai (2013) Blood 122: 1341-1349; Cathomen et al. (2008) Mol. Ther. 16: 1200-7; Guo et al. (2010) J. Mol. Biol. 400: 96; U.S. Patent Publication 2011/0158957; and U.S. Patent Publication 2012/0060230, herein incorporated by reference in their entireties.

### Telomerase Expression

[1364] While not wishing to be bound by any particular theory, in some embodiments, a therapeutic T cell has short term persistence in a patient, due to shortened telomeres in the T cell; accordingly, transfection with a telomerase gene can lengthen the telomeres of the T cell and improve persistence of the T cell in the patient. See Carl June, “Adoptive T cell therapy for cancer in the clinic”, Journal of Clinical Investigation, 117:1466-1476 (2007), herein incorporated by reference in its entirety. Thus, in an embodiment, an immune effector cell, e.g., a T cell, ectopically expresses a telomerase subunit, e.g., the catalytic subunit of telomerase, e.g., TERT, e.g., hTERT. In some aspects, this disclosure provides a method of producing a CAR-expressing cell, comprising contacting a cell with a nucleic acid encoding a telomerase subunit, e.g., the catalytic subunit of telomerase, e.g., TERT, e.g., hTERT. The cell may be contacted with the nucleic acid before, simultaneous with, or after being contacted with a construct encoding a CAR.

### Expansion and Activation

[1365] Immune effector cells such as T cells may be activated and expanded generally using methods as described, for example, in U.S. Pat. Nos. 6,352,694; 6,534,055; 6,905,680; 6,692,964; 5,858,358; 6,887,466; 6,905,681; 7,144,575; 7,067,318; 7,172,869; 7,232,566; 7,175,843; 5,883,223; 6,905,874; 6,797,514; 6,867,041; and U.S. Patent Application Publication No. 20060121005, each of which is incorporated by reference in its entirety.

[1366] Generally, a population of immune effector cells e.g., T regulatory cell depleted cells, may be expanded by contact with a surface having attached thereto an agent that stimulates a CD3/TCR complex associated signal and a ligand that stimulates a costimulatory molecule on the surface of the T cells. In particular, T cell populations may be stimulated as described herein, such as by contact with an anti-CD3 antibody, or antigen-binding fragment thereof, or an anti-CD2 antibody immobilized on a surface, or by contact with a protein kinase C activator (e.g., bryostatin) in conjunction with a calcium ionophore. For co-stimulation of an accessory molecule on the surface of the T cells, a ligand that binds the accessory molecule is used. For example, a population of T cells can be contacted with an anti-CD3 antibody and an anti-CD28 antibody, under conditions appropriate for stimulating proliferation of the T cells. To stimulate proliferation of either CD4+ T cells or CD8+ T cells, an anti-CD3 antibody and an anti-CD28 antibody can be used. Examples of an anti-CD28 antibody include 9.3, B-T3, XR-CD28 (Diaclone, Besançon, France) can be used as can other methods commonly known in the art (Berg et al., Transplant Proc. 30(8):3975-3977, 1998; Haanen et al., J. Exp. Med. 190(9):13191328, 1999; Garland et al., J. Immunol Meth. 227(1-2):53-63, 1999).

[1367] In certain aspects, the primary stimulatory signal and the costimulatory signal for the T cell may be provided by different protocols. For example, the agents providing each signal may be in solution or coupled to a surface. When coupled to a surface, the agents may be coupled to the same surface (i.e., in “cis” formation) or to separate surfaces (i.e., in “trans” formation). Alternatively, one agent may be coupled to a surface and the other agent in solution. In one aspect, the agent providing the costimulatory signal is bound to a cell surface and the agent providing the primary activation signal is in solution or coupled to a surface. In certain aspects, both agents can be in solution. In one aspect, the agents may be in soluble form, and then cross-linked to a surface, such as a cell expressing Fc receptors or an antibody or other binding agent which will bind to the agents. In this regard, see for example, U.S. Patent Application Publication Nos. 20040101519 and 20060034810 for artificial antigen presenting cells (aAPCs) that are contemplated for use in activating and expanding T cells in the present invention, herein incorporated by reference in their entireties.

[1368] In one aspect, the two agents are immobilized on beads, either on the same bead, i.e., “cis,” or to separate beads, i.e., “trans.” By way of example, the agent providing the primary activation signal is an anti-CD3 antibody or an antigen-binding fragment thereof and the agent providing the costimulatory signal is an anti-CD28 antibody or antigen-binding fragment thereof; and both agents are co-immobilized to the same bead in equivalent molecular amounts. In one aspect, a 1:1 ratio of each antibody bound to the beads for CD4+ T cell expansion and T cell growth is used. In certain aspects of the present invention, a ratio of anti CD3:CD28 antibodies bound to the beads is used such that an increase in T cell expansion is observed as compared to the expansion observed using a ratio of 1:1. In one particular aspect an increase of from about 1 to about 3-fold is observed as compared to the expansion observed using a ratio of 1:1. In one aspect, the ratio of CD3:CD28 antibody bound to the beads ranges from 100:1 to 1:100 and all integer values there between. In one aspect, more anti-CD28 antibody is bound to the particles than anti-CD3 antibody, i.e., the ratio of CD3:CD28 is less than one. In certain aspects, the ratio of anti CD28 antibody to anti CD3 antibody bound to the beads is greater than 2:1. In one particular aspect, a 1:100 CD3:CD28 ratio of antibody bound to beads is used. In one aspect, a 1:75 CD3:CD28 ratio of antibody bound to beads is used. In a further aspect, a 1:50 CD3:CD28 ratio of antibody bound to beads is used. In one aspect, a 1:30 CD3:CD28 ratio of antibody bound to beads is used. In one preferred aspect, a 1:10 CD3:CD28 ratio of antibody bound to beads is used. In one aspect, a 1:3 CD3:CD28 ratio of antibody bound to the beads is used. In yet one aspect, a 3:1 CD3:CD28 ratio of antibody bound to the beads is used.

[1369] Ratios of particles to cells from 1:500 to 500:1 and any integer values in between may be used to stimulate T cells or other target cells. As those of ordinary skill in the art can readily appreciate, the ratio of particles to cells may depend on particle size relative to the target cell. For example, small sized beads could only bind a few cells, while larger beads could bind many. In certain aspects the ratio of cells to particles ranges from 1:100 to 100:1 and any integer values in-between and in further aspects the ratio comprises 1:9 to 9:1 and any integer values in between, can also be used to stimulate T cells. The ratio of anti-CD3- and anti-CD28-coupled particles to T cells that result in T cell stimulation can vary as noted above, however certain preferred values include 1:100, 1:50, 1:40, 1:30, 1:20, 1:10, 1:9, 1:8, 1:7, 1:6, 1:5, 1:4, 1:3, 1:2, 1:1, 2:1, 3:1, 4:1, 5:1, 6:1, 7:1, 8:1, 9:1, 10:1, and 15:1 with one preferred ratio being at least 1:1 particles per T cell. In one aspect, a ratio of particles to cells of 1:1 or less is used. In one particular aspect, a preferred particle: cell ratio is 1:5. In further aspects, the ratio of particles to cells can be varied depending on the day of stimulation. For example, in one aspect, the ratio of particles to cells is from 1:1 to 10:1 on the first day and additional particles are added to the cells every day or every other day thereafter for up to 10 days, at final ratios of from 1:1 to 1:10 (based on cell counts on the day of addition). In one particular aspect, the ratio of particles to cells is 1:1 on the first day of stimulation and adjusted to 1:5 on the third and fifth days of stimulation. In one aspect, particles are added on a daily or every other day basis to a final ratio of 1:1 on the first day, and 1:5 on the third and fifth days of stimulation. In one aspect, the ratio of particles to cells is 2:1 on the first day of stimulation and adjusted to 1:10 on the third and fifth days of stimulation. In one aspect, particles are added on a daily or every other day basis to a final ratio of 1:1 on the first day, and 1:10 on the third and fifth days of stimulation. One of skill in the art will appreciate that a variety of other ratios may be suitable for use in the present invention. In particular, ratios will vary depending on particle size and on cell size and type. In one aspect, the most typical ratios for use are in the neighborhood of 1:1, 2:1 and 3:1 on the first day.

[1370] In further aspects, the cells, such as T cells, are combined with agent-coated beads, the beads and the cells are subsequently separated, and then the cells are cultured. In an alternative aspect, prior to culture, the agent-coated beads and cells are not separated but are cultured together. In a further aspect, the beads and cells are first concentrated by application of a force, such as a magnetic force, resulting in increased ligation of cell surface markers, thereby inducing cell stimulation.

[1371] By way of example, cell surface proteins may be ligated by allowing paramagnetic beads to which anti-CD3 and anti-CD28 are attached (3×28 beads) to contact the T cells. In one aspect the cells (for example, 10⁴ to 109 T cells) and beads (for example, DYNABEADS® M-450 CD3/CD28 T paramagnetic beads at a ratio of 1:1) are combined in a buffer, for example PBS (without divalent cations such as, calcium and magnesium). Again, those of ordinary skill in the art can readily appreciate any cell concentration may be used. For example, the target cell may be very rare in the sample and comprise only 0.01% of the sample or the entire sample (i.e., 100%) may comprise the target cell of interest. Accordingly, any cell number is within the context of the present invention. In certain aspects, it may be desirable to significantly decrease the volume in which particles and cells are mixed together (i.e., increase the concentration of cells), to ensure maximum contact of cells and particles. For example, in one aspect, a concentration of about 10 billion cells/ml, 9 billion/ml, 8 billion/ml, 7 billion/ml, 6 billion/ml, 5 billion/ml, or 2 billion cells/ml is used. In one aspect, greater than 100 million cells/ml is used. In a further aspect, a concentration of cells of 10, 15, 20, 25, 30, 35, 40, 45, or 50 million cells/ml is used. In yet one aspect, a concentration of cells from 75, 80, 85, 90, 95, or 100 million cells/ml is used. In further aspects, concentrations of 125 or 150 million cells/ml can be used. Using high concentrations can result in increased cell yield, cell activation, and cell expansion. Further, use of high cell concentrations allows more efficient capture of cells that may weakly express target antigens of interest, such as CD28-negative T cells. Such populations of cells may have therapeutic value and would be desirable to obtain in certain aspects. For example, using high concentration of cells allows more efficient selection of CD8+ T cells that normally have weaker CD28 expression.

[1372] In one embodiment, cells transduced with a nucleic acid encoding a fusion polypeptide, e.g., as described herein, comprising a domain that includes a CAR, e.g., a CAR described herein, are expanded, e.g., by a method described herein. In one embodiment, the cells are expanded in culture for a period of several hours (e.g., about 2, 3, 4, 5, 6, 7, 8, 9, 10, 15, 18, 21 hours) to about 14 days (e.g., 1, 2, 3, 4, 5, 6, 7, 8, 9, 10, 11, 12, 13 or 14 days). In one embodiment, the cells are expanded for a period of 4 to 9 days. In one embodiment, the cells are expanded for a period of 8 days or less, e.g., 7, 6 or 5 days. In one embodiment, the cells are expanded in culture for 5 days, and the resulting cells are more potent than the same cells expanded in culture for 9 days under the same culture conditions. Potency can be defined, e.g., by various T cell functions, e.g. proliferation, target cell killing, cytokine production, activation, migration, or combinations thereof. In one embodiment, the cells are expanded for 5 days show at least a one, two, three or four fold increase in cells doublings upon antigen stimulation as compared to the same cells expanded in culture for 9 days under the same culture conditions. In one embodiment, the cells are expanded in culture for 5 days, and the resulting cells exhibit higher proinflammatory cytokine production, e.g., IFN-γ and/or GM-CSF levels, as compared to the same cells expanded in culture for 9 days under the same culture conditions. In one embodiment, the cells expanded for 5 days show at least a one, two, three, four, five, ten fold or more increase in pg/ml of proinflammatory cytokine production, e.g., IFN-γ and/or GM-CSF levels, as compared to the same cells expanded in culture for 9 days under the same culture conditions.

[1373] Several cycles of stimulation may also be desired such that culture time of T cells can be 60 days or more. Conditions appropriate for T cell culture include an appropriate media (e.g., Minimal Essential Media or RPMI Media 1640 or, X-vivo 15, (Lonza)) that may contain factors necessary for proliferation and viability, including serum (e.g., fetal bovine or human serum), interleukin-2 (IL-2), insulin, IFN-γ, IL-4, IL-7, GM-CSF, IL-10, IL-12, IL-15, TGFβ, and TNF-α or any other additives for the growth of cells known to the skilled artisan. Other additives for the growth of cells include, but are not limited to, surfactant, plasmanate, and reducing agents such as N-acetyl-cysteine and 2-mercaptoethanol. Media can include RPMI 1640, AIM-V, DMEM, MEM, α-MEM, F-12, X-Vivo 15, and X-Vivo 20, Optimizer, with added amino acids, sodium pyruvate, and vitamins, either serum-free or supplemented with an appropriate amount of serum (or plasma) or a defined set of hormones, and/or an amount of cytokine(s) sufficient for the growth and expansion of T cells. Antibiotics, e.g., penicillin and streptomycin, are included only in experimental cultures, not in cultures of cells that are to be infused into a subject. The target cells are maintained under conditions necessary to support growth, for example, an appropriate temperature (e.g., 37° C.) and atmosphere (e.g., air plus 5% CO₂).

[1374] In one embodiment, the cells are expanded in an appropriate media (e.g., media described herein) that includes one or more interleukin that result in at least a 200-fold (e.g., 200-fold, 250-fold, 300-fold, 350-fold) increase in cells over a 14 day expansion period, e.g., as measured by a method described herein such as flow cytometry. In one embodiment, the cells are expanded in the presence of IL-15 and/or IL-7 (e.g., IL-15 and IL-7).

[1375] In embodiments, methods described herein, e.g., fusion polypeptide, e.g., as described herein, comprising a domain that includes a CAR, -expressing cell manufacturing methods, comprise removing T regulatory cells, e.g., CD25+ T cells, from a cell population, e.g., using an anti-CD25 antibody, or fragment thereof, or a CD25-binding ligand, IL-2. Methods of removing T regulatory cells, e.g., CD25+ T cells, from a cell population are described herein. In embodiments, the methods, e.g., manufacturing methods, further comprise contacting a cell population (e.g., a cell population in which T regulatory cells, such as CD25+ T cells, have been depleted; or a cell population that has previously contacted an anti-CD25 antibody, fragment thereof, or CD25-binding ligand) with IL-15 and/or IL-7. For example, the cell population (e.g., that has previously contacted an anti-CD25 antibody, fragment thereof, or CD25-binding ligand) is expanded in the presence of IL-15 and/or IL-7.

[1376] In some embodiments a fusion polypeptide, e.g., as described herein, comprising a domain that includes a CAR, -expressing cell described herein is contacted with a composition comprising a interleukin-15 (IL-15) polypeptide, a interleukin-15 receptor alpha (IL-15Ra) polypeptide, or a combination of both a IL-15 polypeptide and a IL-15Ra polypeptide e.g., hetIL-15, during the manufacturing of the CAR-expressing cell, e.g., ex vivo. In embodiments, a CAR-expressing cell described herein is contacted with a composition comprising a IL-15 polypeptide during the manufacturing of the CAR-expressing cell, e.g., ex vivo. In embodiments, a CAR-expressing cell described herein is contacted with a composition comprising a combination of both a IL-15 polypeptide and a IL-15 Ra polypeptide during the manufacturing of the CAR-expressing cell, e.g., ex vivo. In embodiments, a CAR-expressing cell described herein is contacted with a composition comprising hetIL-15 during the manufacturing of the CAR-expressing cell, e.g., ex vivo.

[1377] In one embodiment the fusion polypeptide, e.g., as described herein, comprising a domain that includes a CAR, -expressing cell described herein is contacted with a composition comprising hetIL-15 during ex vivo expansion. In an embodiment, the CAR-expressing cell described herein is contacted with a composition comprising an IL-15 polypeptide during ex vivo expansion. In an embodiment, the CAR-expressing cell described herein is contacted with a composition comprising both an IL-15 polypeptide and an IL-15Ra polypeptide during ex vivo expansion. In one embodiment the contacting results in the survival and proliferation of a lymphocyte subpopulation, e.g., CD8+ T cells.

[1378] T cells that have been exposed to varied stimulation times may exhibit different characteristics. For example, typical blood or apheresed peripheral blood mononuclear cell products have a helper T cell population (TH, CD4+) that is greater than the cytotoxic or suppressor T cell population (TC, CD8+). Ex vivo expansion of T cells by stimulating CD3 and CD28 receptors produces a population of T cells that prior to about days 8-9 consists predominately of TH cells, while after about days 8-9, the population of T cells comprises an increasingly greater population of TC cells. Accordingly, depending on the purpose of treatment, infusing a subject with a T cell population comprising predominately of TH cells may be advantageous. Similarly, if an antigen-specific subset of TC cells has been isolated it may be beneficial to expand this subset to a greater degree.

[1379] Further, in addition to CD4 and CD8 markers, other phenotypic markers vary significantly, but in large part, reproducibly during the course of the cell expansion process. Thus, such reproducibility enables the ability to tailor an activated T cell product for specific purposes.

[1380] Once a fusion polypeptide, e.g., as described herein, comprising a domain that includes a CAR, described herein is constructed, various assays can be used to evaluate the activity of the molecule, such as but not limited to, the ability to expand T cells following antigen stimulation, sustain T cell expansion in the absence of re-stimulation, and anti-cancer activities in appropriate in vitro and animal models. Assays to evaluate the effects of a cars of the present disclosure are described in further detail below.

[1381] Western blot analysis of fusion polypeptide, e.g., as described herein, comprising a domain that includes a CAR, expression in primary T cells can be used to detect the presence of monomers and dimers. See, e.g., Milone et al., Molecular Therapy 17(8): 1453-1464 (2009). Very briefly, T cells (1:1 mixture of CD4⁺ and CD8⁺ T cells) expressing the CARs are expanded in vitro for more than 10 days followed by lysis and SDS-PAGE under reducing conditions. CARs containing the full length TCR-ζ cytoplasmic domain and the endogenous TCR-ζ chain are detected by western blotting using an antibody to the TCR-ζ chain. The same T cell subsets are used for SDS-PAGE analysis under non-reducing conditions to permit evaluation of covalent dimer formation.

[1382] In vitro expansion of fusion polypeptide⁺, e.g., as described herein, comprising a domain that includes a CAR, e.g., CAR⁺, T cells following antigen stimulation can be measured by flow cytometry. For example, a mixture of CD4⁺ and CD8⁺ T cells are stimulated with αCD3/αCD28 aAPCs followed by transduction with lentiviral vectors expressing GFP under the control of the promoters to be analyzed. Exemplary promoters include the CMV IE gene, EF-1α, ubiquitin C, or phosphoglycerokinase (PGK) promoters. GFP fluorescence is evaluated on day 6 of culture in the CD4⁺ and/or CD8⁺ T cell subsets by flow cytometry. See, e.g., Milone et al., Molecular Therapy 17(8): 1453-1464 (2009). Alternatively, a mixture of CD4⁺ and CD8⁺ T cells are stimulated with αCD3/αCD28 coated magnetic beads on day 0, and transduced with CAR on day 1 using a bicistronic lentiviral vector expressing CAR along with eGFP using a 2A ribosomal skipping sequence. Cultures are re-stimulated with either a cancer associated antigen as described herein⁺ K562 cells (K562 expressing a cancer associated antigen as described herein), wild-type K562 cells (K562 wild type) or K562 cells expressing hCD32 and 4-1BBL in the presence of antiCD3 and anti-CD28 antibody (K562-BBL-3/28) following washing. Exogenous IL-2 is added to the cultures every other day at 100 IU/ml. GFP⁺ T cells are enumerated by flow cytometry using bead-based counting. See, e.g., Milone et al., Molecular Therapy 17(8): 1453-1464 (2009).

[1383] Sustained fusion polypeptide⁺, e.g., as described herein, comprising a domain that includes a CAR, e.g., CAR⁺, T cell expansion in the absence of re-stimulation can also be measured. See, e.g., Milone et al., Molecular Therapy 17(8): 1453-1464 (2009). Briefly, mean T cell volume (fl) is measured on day 8 of culture using a Coulter Multisizer III particle counter, a Nexcelom Cellometer Vision or Millipore Scepter, following stimulation with αCD3/αCD28 coated magnetic beads on day 0, and transduction with the indicated CAR on day 1.

[1384] Animal models can also be used to measure a CART activity. For example, xenograft model using human a cancer associated antigen described herein-specific CAR⁺ T cells to treat a primary human pre-B ALL in immunodeficient mice can be used. See, e.g., Milone et al., Molecular Therapy 17(8): 1453-1464 (2009). Very briefly, after establishment of ALL, mice are randomized as to treatment groups. Different numbers of a cancer associated antigen-specific CARengineered T cells are coinjected at a 1:1 ratio into NOD-SCID-γ^{-/-} mice bearing B-ALL. The number of copies of a cancer associated antigen-specific CAR vector in spleen DNA from mice is evaluated at various times following T cell injection. Animals are assessed for leukemia at weekly intervals. Peripheral blood a cancer associate antigen as described herein⁺ B-ALL blast cell counts are measured in mice that are injected with a cancer associated antigen described herein-ζ CAR⁺ T cells or mock-transduced T cells. Survival curves for the groups are compared using the log-rank test. In addition, absolute peripheral blood CD4+ and CD8+ T cell counts 4 weeks following T cell injection in NOD-SCID-γ^{-/-} mice can also be analyzed. Mice are injected with leukemic cells and 3 weeks later are injected with T cells engineered to express CAR by a bicistronic lentiviral vector that encodes the CAR linked to eGFP. T cells are normalized to 45-50% input GFP⁺ T cells by mixing with mock-transduced cells prior to injection, and confirmed by flow cytometry. Animals are assessed for leukemia at 1-week intervals. Survival curves for the CAR⁺ T cell groups are compared using the log-rank test.

[1385] Dose dependent fusion polypeptide, e.g., as described herein, comprising a domain that includes a CAR, treatment response can be evaluated. See, e.g., Milone et al., Molecular Therapy 17(8): 1453-1464 (2009). For example, peripheral blood is obtained 35-70 days after establishing leukemia in mice injected on day 21 with CAR T cells, an equivalent number of mock-transduced T cells, or no T cells. Mice from each group are randomly bled for determination of peripheral blood a cancer associate antigen as described herein⁺ ALL blast counts and then killed on days 35 and 49. The remaining animals are evaluated on days 57 and 70.

[1386] Assessment of cell proliferation and cytokine production has been previously described, e.g., at Milone et al., Molecular Therapy 17(8): 1453-1464 (2009). Briefly, assessment of CAR-mediated proliferation is performed in microtiter plates by mixing washed T cells with K562 cells expressing a cancer associated antigen described herein (K19) or CD32 and CD137 (KT32-BBL) for a final T-cell:K562 ratio of 2:1. K562 cells are irradiated with gamma-radiation prior to use. Anti-CD3 (clone OKT3) and anti-CD28 (clone 9.3) monoclonal antibodies are added to cultures with KT32-BBL cells to serve as a positive control for stimulating T-cell proliferation since these signals support long-term CD8⁺ T cell expansion ex vivo. T cells are enumerated in cultures using CountBright™ fluorescent beads (Invitrogen, Carlsbad, CA) and flow cytometry as described by the manufacturer. CAR⁺ T cells are identified by GFP expression using T cells that are engineered with eGFP-2A linked CAR-expressing lentiviral vectors. For CAR+ T cells not expressing GFP, the CAR+ T cells are detected with biotinylated recombinant a cancer associate antigen as described herein protein and a secondary avidin-PE conjugate. CD4+ and CD8⁺ expression on T cells are also simultaneously detected with specific monoclonal antibodies (BD Biosciences). Cytokine measurements are performed on supernatants collected 24 hours following re-stimulation using the human TH1/TH2 cytokine cytometric bead array kit (BD Biosciences, San Diego, CA) according the manufacturer's instructions. Fluorescence is assessed using a FACScalibur flow cytometer, and data is analyzed according to the manufacturer's instructions.

[1387] Cytotoxicity can be assessed by a standard 51Cr-release assay. See, e.g., Milone et al., Molecular Therapy 17(8): 1453-1464 (2009). Briefly, target cells (K562 lines and primary pro-B-ALL cells) are loaded with 51Cr (as NaCrO4, New England Nuclear, Boston, MA) at 37° C. for 2 hours with frequent agitation, washed twice in complete RPMI and plated into microtiter plates. Effector T cells are mixed with target cells in the wells in complete RPMI at varying ratios of effector cell:target cell (E:T). Additional wells containing media only (spontaneous release, SR) or a 1% solution of triton-X 100 detergent (total release, TR) are also prepared. After 4 hours of incubation at 37° C., supernatant from each well is harvested. Released 51Cr is then measured using a gamma particle counter (Packard Instrument Co., Waltham, MA). Each condition is performed in at least triplicate, and the percentage of lysis is calculated using the formula: % Lysis=(ER−SR)/(TR−SR), where ER represents the average 51Cr released for each experimental condition.

[1388] Imaging technologies can be used to evaluate specific trafficking and proliferation of CARs in tumor-bearing animal models. Such assays have been described, for example, in Barrett et al., Human Gene Therapy 22:1575-1586 (2011). Briefly, NOD/SCID/γc^{-/-} (NSG) mice are injected IV with Nalm-6 cells followed 7 days later with T cells 4 hour after electroporation with the CAR constructs. The T cells are stably transfected with a lentiviral construct to express firefly luciferase, and mice are imaged for bioluminescence. Alternatively, therapeutic efficacy and specificity of a single injection of CAR⁺ T cells in Nalm-6 xenograft model can be measured as the following: NSG mice are injected with Nalm-6 transduced to stably express firefly luciferase, followed by a single tail-vein injection of T cells electroporated with cars of the present disclosure7 days later. Animals are imaged at various time points post injection. For example, photon-density heat maps of firefly luciferasepositive leukemia in representative mice at day 5 (2 days before treatment) and day 8 (24 hr post CAR⁺ PBLs) can be generated.

[1389] Other assays, including those described in the Example section herein as well as those that are known in the art can also be used to evaluate the CARs described herein.

### Methods of Making CAR-Expressing Cells

[1390] In another aspect, the invention pertains to a method of making a cell (e.g., an immune effector cell or population thereof) comprising introducing into (e.g., transducing) a cell, e.g., a T cell or a NK cell described herein, with a vector of comprising a nucleic acid encoding a fusion polypeptide, e.g., as described herein, comprising a domain that includes a CAR, e.g., a CAR described herein; or a nucleic acid encoding a CAR molecule e.g., a CAR described herein.

[1391] The cell in the methods is an immune effector cell (e.g., aT cell or a NK cell, or a combination thereof). In some embodiments, the cell in the methods is diaglycerol kinase (DGK) and/or Ikaros deficient.

[1392] In some embodiment, the introducing the nucleic acid molecule encoding a CAR comprises transducing a vector comprising the nucleic acid molecule encoding a fusion polypeptide, e.g., as described herein, comprising a domain that includes a CAR, or transfecting the nucleic acid molecule encoding a CAR, wherein the nucleic acid molecule is an in vitro transcribed RNA.

[1393] In some embodiments, the method further comprises:
[1394] providing a population of immune effector cells (e.g., T cells or NK cells); and
[1395] removing T regulatory cells from the population, thereby providing a population of T regulatory-depleted cells;
[1396] wherein steps a) and b) are performed prior to introducing the nucleic acid encoding the fusion polypeptide, e.g., as described herein, comprising a domain that includes a CAR, to the population.

[1397] In embodiments of the methods, the T regulatory cells comprise CD25+ T cells, and are removed from the cell population using an anti-CD25 antibody, or fragment thereof. The anti-CD25 antibody, or fragment thereof, can be conjugated to a substrate, e.g., a bead.

[1398] In other embodiments, the population of T regulatory-depleted cells provided from step (b) contains less than 30%, 25%, 20%, 15%, 10%, 5%, 4%, 3%, 2%, 1% of CD25+ cells.

[1399] In yet other embodiments, the method further comprises removing cells from the population which express a tumor antigen that does not comprise CD25 to provide a population of T regulatory-depleted and tumor antigen depleted cells prior to introducing the nucleic acid encoding a fusion polypeptide, e.g., as described herein, comprising a domain that includes a CAR, to the population. The tumor antigen can be selected from CD19, CD30, CD38, CD123, CD20, CD14 or CD11 b, or a combination thereof.

[1400] In other embodiments, the method further comprises removing cells from the population which express a checkpoint inhibitor, to provide a population of T regulatory-depleted and inhibitory molecule depleted cells prior to introducing the nucleic acid encoding a fusion polypeptide, e.g., as described herein, comprising a domain that includes a CAR, to the population. The checkpoint inhibitor can be chosen from PD-1, LAG-3, TIM3, B7-H1, CD160, P1H, 2B4, CEACAM (e.g., CEACAM-1, CEACAM-3, and/or CEACAM-5), TIGIT, CTLA-4, BTLA, and LAIR1.

[1401] Further embodiments disclosed herein encompass providing a population of immune effector cells. The population of immune effector cells provided can be selected based upon the expression of one or more of CD3, CD28, CD4, CD8, CD45RA, and/or CD45RO. In certain embodiments, the population of immune effector cells provided are CD3+ and/or CD28+.

[1402] In certain embodiments of the method, the method further comprises expanding the population of cells after the nucleic acid molecule encoding a fusion polypeptide, e.g., as described herein, comprising a domain that includes a CAR, has been introduced.

[1403] In embodiments, the population of cells is expanded for a period of 8 days or less.

[1404] In certain embodiments, the population of cells is expanded in culture for 5 days, and the resulting cells are more potent than the same cells expanded in culture for 9 days under the same culture conditions.

[1405] In other embodiments, the population of cells is expanded in culture for 5 days show at least a one, two, three or four fold increase in cell doublings upon antigen stimulation as compared to the same cells expanded in culture for 9 days under the same culture conditions.

[1406] In yet other embodiments, the population of cells is expanded in culture for 5 days, and the resulting cells exhibit higher proinflammatory IFN-γ and/or GM-CSF levels, as compared to the same cells expanded in culture for 9 days under the same culture conditions.

[1407] In other embodiments, the population of cells is expanded by culturing the cells in the presence of an agent that stimulates a CD3/TCR complex associated signal and/or a ligand that stimulates a costimulatory molecule on the surface of the cells. The agent can be a bead conjugated with anti-CD3 antibody, or a fragment thereof, and/or anti-CD28 antibody, or a fragment thereof.

[1408] In other embodiments, the population of cells is expanded in an appropriate media that includes one or more interleukin that result in at least a 200-fold, 250-fold, 300-fold, or 350-fold increase in cells over a 14 day expansion period, as measured by flow cytometry.

[1409] In other embodiments, the population of cells is expanded in the presence IL-15 and/or IL-7.

[1410] In certain embodiments, the method further includes cryopreserving the population of the cells after the appropriate expansion period.

[1411] In yet other embodiments, the method of making disclosed herein further comprises contacting the population of immune effector cells with a nucleic acid encoding a telomerase subunit, e.g., hTERT. The nucleic acid encoding the telomerase subunit can be DNA.

[1412] The present disclosure also provides a method of generating a population of RNA-engineered cells, e.g., cells described herein, e.g., immune effector cells (e.g., T cells, NK cells), transiently expressing exogenous RNA. The method comprises introducing an in vitro transcribed RNA or synthetic RNA into a cell, where the RNA comprises a nucleic acid encoding a fusion polypeptide, e.g., as described herein, comprising a domain that includes a CAR molecule, described herein.

[1413] In another aspect, the invention pertains to a method of providing an anti-tumor immunity in a subject comprising administering to the subject an effective amount of a cell comprising a fusion polypeptide, e.g., as described herein, comprising a domain that includes a CAR molecule, e.g., a cell expressing a CAR molecule described herein. In one embodiment, the cell is an autologous T cell or NK cell. In one embodiment, the cell is an allogeneic T cell or NK cell. In one embodiment, the subject is a human.

[1414] In one aspect, the invention includes a population of autologous cells that are transfected or transduced with a vector comprising a nucleic acid molecule encoding a fusion polypeptide, e.g., as described herein, comprising a domain that includes a CAR molecule, e.g., as described herein. In one embodiment, the vector is a retroviral vector. In one embodiment, the vector is a self-inactivating lentiviral vector as described elsewhere herein. In one embodiment, the vector is delivered (e.g., by transfecting or electroporating) to a cell, e.g., a T cell or a NK cell, wherein the vector comprises a nucleic acid molecule encoding a CAR of the present disclosure as described herein, which is transcribed as an mRNA molecule, and the CARs of the present disclosure is translated from the RNA molecule and expressed on the surface of the cell.

[1415] In another aspect, the present disclosure provides a population of fusion polypeptide, e.g., as described herein, comprising a domain that includes a CAR, -expressing cells, e.g., CAR-expressing immune effector cells (e.g., T cells or NK cells). In some embodiments, the population of CAR-expressing cells comprises a mixture of cells expressing different CARs. For example, in one embodiment, the population of CAR-expressing immune effector cells (e.g., T cells or NK cells) can include a first cell expressing a CAR having an antigen binding domain that binds to a first tumor antigen as described herein, and a second cell expressing a CAR having a different antigen binding domain that binds to a second tumor antigen as described herein. As another example, the population of CAR-expressing cells can include a first cell expressing a CAR that includes an antigen binding domain that binds to a tumor antigen as described herein, and a second cell expressing a CAR that includes an antigen binding domain to a target other than a tumor antigen as described herein. In one embodiment, the population of CAR-expressing cells includes, e.g., a first cell expressing a CAR that includes a primary intracellular signaling domain, and a second cell expressing a CAR that includes a secondary signaling domain, e.g., a costimulatory signaling domain.

[1416] In another aspect, the present disclosure provides a population of cells wherein at least one cell in the population expresses a fusion polypeptide, e.g., as described herein, comprising a domain that includes a CAR having an antigen binding domain that binds to a tumor antigen as described herein, and a second cell expressing another agent, e.g., an agent which enhances the activity of a CAR-expressing cell. For example, in one embodiment, the agent can be an agent which inhibits an inhibitory molecule. Examples of inhibitory molecules include PD-1, PD-L1, CTLA-4, TIM-3, CEACAM (e.g., CEACAM-1, CEACAM-3 and/or CEACAM-5), LAG-3, VISTA, BTLA, TIGIT, LAIR1, CD160, 2B4 and TGFR beta. In one embodiment, the agent which inhibits an inhibitory molecule, e.g., is a molecule described herein, e.g., an agent that comprises a first polypeptide, e.g., an inhibitory molecule, associated with a second polypeptide that provides a positive signal to the cell, e.g., an intracellular signaling domain described herein. In one embodiment, the agent comprises a first polypeptide, e.g., of an inhibitory molecule such as PD-1, LAG-3, CTLA-4, CD160, BTLA, LAIR1, TIM-3, CEACAM (e.g., CEACAM-1, CEACAM-3 and/or CEACAM-5), 2B4 and TIGIT, or a fragment of any of these, and a second polypeptide which is an intracellular signaling domain described herein (e.g., comprising a costimulatory domain (e.g., 41BB, CD27 or CD28, e.g., as described herein) and/or a primary signaling domain (e.g., a CD3 zeta signaling domain described herein). In one embodiment, the agent comprises a first polypeptide of PD-1 or a fragment thereof, and a second polypeptide of an intracellular signaling domain described herein (e.g., a CD28, CD27, OX40 or 4-IBB signaling domain described herein and/or a CD3 zeta signaling domain described herein).

[1417] In one embodiment, the nucleic acid molecule encoding a fusion polypeptide, e.g., as described herein, comprising a domain that includes a CAR of the present disclosure, e.g., as described herein, is expressed as an mRNA molecule. In one embodiment, the genetically modified CAR of the present invention-expressing cells, e.g., immune effector cells (e.g., T cells, NK cells), can be generated by transfecting or electroporating an RNA molecule encoding the desired CARs (e.g., without a vector sequence) into the cell. In one embodiment, a CAR of the present disclosure is translated from the RNA molecule once it is incorporated and expressed on the surface of the recombinant cell.

[1418] A method for generating mRNA for use in transfection involves in vitro transcription (IVT) of a template with specially designed primers, followed by polyA addition, to produce a construct containing 3′ and 5′ untranslated sequence (“UTR”) (e.g., a 3′ and/or 5′ UTR described herein), a 5′ cap (e.g., a 5′ cap described herein) and/or Internal Ribosome Entry Site (IRES) (e.g., an IRES described herein), the nucleic acid to be expressed, and a polyA tail, typically 50-5000 bases in length (SEQ ID NO: 174). RNA so produced can efficiently transfect different kinds of cells. In one embodiment, the template includes sequences for the fusion polypeptide, e.g., as described herein, comprising a domain that includes a CAR. In an embodiment, an RNA fusion polypeptide, e.g., as described herein, comprising a domain that includes a CAR, vector is transduced into a cell, e.g., a T cell or a NK cell, by electroporation.

[1419] In one embodiment, the fusion polypeptide, e.g., as described herein, comprising a domain that includes a CAR, is introduced into immune effector cells (e.g., T cells, NK cells), e.g., using in vitro transcription, and the subject (e.g., human) receives an initial administration of fusion polypeptide, e.g., as described herein, comprising a domain that includes a CAR, immune effector cells (e.g., T cells, NK cells) of the invention, and one or more subsequent administrations of the fusion polypeptide, e.g., as described herein, comprising a domain that includes a CAR, immune effector cells (e.g., T cells, NK cells) of the invention, wherein the one or more subsequent administrations are administered less than 15 days, e.g., 14, 13, 12, 11, 10, 9, 8, 7, 6, 5, 4, 3, or 2 days after the previous administration. In one embodiment, more than one administration of the CAR immune effector cells (e.g., T cells, NK cells) of the invention are administered to the subject (e.g., human) per week, e.g., 2, 3, or 4 administrations of the CAR immune effector cells (e.g., T cells, NK cells) of the invention are administered per week. In one embodiment, the subject (e.g., human subject) receives more than one administration of the CAR immune effector cells (e.g., T cells, NK cells) per week (e.g., 2, 3 or 4 administrations per week) (also referred to herein as a cycle), followed by a week of no CAR immune effector cells (e.g., T cells, NK cells) administrations, and then one or more additional administration of the CAR immune effector cells (e.g., T cells, NK cells) (e.g., more than one administration of the CAR immune effector cells (e.g., T cells, NK cells) per week) is administered to the subject. In another embodiment, the subject (e.g., human subject) receives more than one cycle of CAR immune effector cells (e.g., T cells, NK cells), and the time between each cycle is less than 10, 9, 8, 7, 6, 5, 4, or 3 days. In one embodiment, the CAR immune effector cells (e.g., T cells, NK cells) are administered every other day for 3 administrations per week. In one embodiment, the CAR immune effector cells (e.g., T cells, NK cells) of the invention are administered for at least two, three, four, five, six, seven, eight or more weeks.

[1420] In one aspect, CAR-expressing cells are generated using lentiviral viral vectors, such as lentivirus. Cells, e.g., CARTs, generated that way will have stable CAR expression.

[1421] In one aspect, CAR-expressing cells, e.g., CARTs, are generated using a viral vector such as a gammaretroviral vector, e.g., a gammaretroviral vector described herein. CARTs generated using these vectors can have stable CAR expression.

[1422] In one aspect, CARTs transiently express CAR vectors for 4, 5, 6, 7, 8, 9, 10, 11, 12, 13, 14, 15 days after transduction. Transient expression of CARs can be effected by RNA CAR vector delivery. In one aspect, the CAR RNA is transduced into the T cell by electroporation.

[1423] A potential issue that can arise in patients being treated using transiently expressing CAR immune effector cells (e.g., T cells, NK cells) (particularly with murine scFv bearing CARTs) is anaphylaxis after multiple treatments.

[1424] Without being bound by this theory, it is believed that such an anaphylactic response might be caused by a patient developing humoral anti-CAR response, i.e., anti-CAR antibodies having an anti-IgE isotype. It is thought that a patient's antibody producing cells undergo a class switch from IgG isotype (that does not cause anaphylaxis) to IgE isotype when there is a ten to fourteen day break in exposure to antigen. If a patient is at high risk of generating an anti-CAR antibody response during the course of transient CAR therapy (such as those generated by RNA transductions), CART infusion breaks should not last more than ten to fourteen days.

### Pharmaceutical Composition

[1425] Pharmaceutical compositions of the present disclosure may comprise any fusion polypeptide, nucleic acid encoding such a fusion polypeptide, or cells comprising the fusion polypeptide, as described herein, and one or more pharmaceutically or physiologically acceptable carriers, diluents or excipients. Such compositions may comprise buffers such as neutral buffered saline, phosphate buffered saline and the like; carbohydrates such as glucose, mannose, sucrose or dextrans, mannitol; proteins; polypeptides or amino acids such as glycine; antioxidants; chelating agents such as EDTA or glutathione; adjuvants (e.g., aluminum hydroxide); and preservatives. Compositions of the present disclosure are in one aspect formulated for intravenous administration.

[1426] Pharmaceutical compositions of the present disclosure may be administered in a manner appropriate to the disease to be treated (or prevented). The quantity and frequency of administration will be determined by such factors as the condition of the patient, and the type and severity of the patient's disease, although appropriate dosages may be determined by clinical trials.

[1427] In one aspect, the invention includes a pharmaceutical composition formulated for use in the method as described herein, the composition comprising a modified T cell comprising a nucleic acid encoding a suicide gene and a nucleic acid encoding a chimeric antigen receptor comprising an anti-B cell binding domain, a transmembrane domain, a costimulatory domain and an intracellular signaling domain.

[1428] In another aspect, the invention includes a pharmaceutical composition formulated for use in the method as described herein, the composition comprising a modified T cell comprising a nucleic acid encoding a dimerization domain and a chimeric antigen receptor (CAR) comprising an anti-B cell binding domain, a transmembrane domain, a costimulatory domain and an intracellular signaling domain

[1429] In one embodiment, the pharmaceutical composition is substantially free of, e.g., there are no detectable levels of a contaminant, e.g., selected from the group consisting of endotoxin, mycoplasma, replication competent lentivirus (RCL), p24, VSV-G nucleic acid, HIV gag, residual anti-CD3/anti-CD28 coated beads, mouse antibodies, pooled human serum, bovine serum albumin, bovine serum, culture media components, vector packaging cell or plasmid components, a bacterium and a fungus. In one embodiment, the bacterium is at least one selected from the group consisting of Alcaligenes faecalis, Candida albicans, Escherichia coli, Haemophilus influenza, Neisseria meningitides, Pseudomonas aeruginosa, Staphylococcus aureus, Streptococcus pneumonia, and Streptococcus pyogenes group A.

[1430] When “an immunologically effective amount,” “an anti-tumor effective amount,” “a tumor-inhibiting effective amount,” or “therapeutic amount” is indicated, the precise amount of the compositions of the present disclosure to be administered can be determined by a physician with consideration of individual differences in age, weight, tumor size, extent of infection or metastasis, and condition of the patient (subject). It can generally be stated that a pharmaceutical composition comprising the immune effector cells (e.g., T cells, NK cells) described herein may be administered at a dosage of 10⁴ to 10⁹ cells/kg body weight, in some instances 10⁵ to 10⁶ cells/kg body weight, including all integer values within those ranges. T cell compositions may also be administered multiple times at these dosages. The cells can be administered by using infusion techniques that are commonly known in immunotherapy (see, e.g., Rosenberg et al., New Eng. J. of Med. 319:1676, 1988).

[1431] In certain aspects, it may be desired to administer activated immune effector cells (e.g., T cells, NK cells) to a subject and then subsequently redraw blood (or have an apheresis performed), activate immune effector cells (e.g., T cells, NK cells) therefrom according to the present invention, and reinfuse the patient with these activated and expanded immune effector cells (e.g., T cells, NK cells). This process can be carried out multiple times every few weeks. In certain aspects, immune effector cells (e.g., T cells, NK cells) can be activated from blood draws of from 10 cc to 400 cc. In certain aspects, immune effector cells (e.g., T cells, NK cells) are activated from blood draws of 20 cc, 30 cc, 40 cc, 50 cc, 60 cc, 70 cc, 80 cc, 90 cc, or 100 cc.

[1432] The administration of the subject compositions may be carried out in any convenient manner, including by aerosol inhalation, injection, ingestion, transfusion, implantation or transplantation. The compositions described herein may be administered to a patient transarterially, subcutaneously, intradermally, intratumorally, intranodally, intramedullary, intramuscularly, by intravenous (i.v.) injection, or intraperitoneally. In one aspect, the cell compositions of the present disclosure are administered to a patient by intradermal or subcutaneous injection. In one aspect, the cell compositions of the present disclosure are administered by i.v. injection. The compositions of immune effector cells (e.g., T cells, NK cells) may be injected directly into a tumor, lymph node, or site of infection.

[1433] In a particular exemplary aspect, subjects may undergo leukapheresis, wherein leukocytes are collected, enriched, or depleted ex vivo to select and/or isolate the cells of interest, e.g., T cells. These T cell isolates may be expanded by methods known in the art and treated such that one or more CAR constructs of the invention may be introduced, thereby creating a CAR T cell of the invention. Subjects in need thereof may subsequently undergo standard treatment with high dose chemotherapy followed by peripheral blood stem cell transplantation. In certain aspects, following or concurrent with the transplant, subjects receive an infusion of the expanded CAR T cells of the present invention. In an additional aspect, expanded cells are administered before or following surgery.

[1434] The dosage of the above treatments to be administered to a patient will vary with the precise nature of the condition being treated and the recipient of the treatment. The scaling of dosages for human administration can be performed according to art-accepted practices.

### Methods of Selectively Regulating the Expression of the Fusion Polypeptide

[1435] Provided herein are also methods of selectively regulating (e.g., degrading) a fusion polypeptide (e.g., a fusion polypeptide comprising a COF1/CRBN-, COF2/CRBN-, or COF3/CRBN-binding polypeptide and a heterologous polypeptide, e.g., a CAR polypeptide). Such methods can include contacting a cell comprising any of the fusion polypeptides described herein or a nucleic acid encoding such a fusion polypeptide with COF1, COF2, or COF3. In some embodiments, the COF1/CRBN-, COF2/CRBN-, or COF3/CRBN-binding polypeptide increases a post-translational modification and/or degradation of the fusion polypeptide in the presence of COF1, COF2, or COF3, e.g., relative to the modification and/or degradation in the absence of COF1, COF2, or COF3. In one embodiment, the COF1/CRBN-, COF2/CRBN-, or COF3/CRBN-binding polypeptide increases selective ubiquitination of the fusion polypeptide in the presence of COF1, COF2, or COF3, e.g., relative to the ubiquitination in the absence of COF1, COF2, or COF3. In some embodiments, the cell is contacted with COF1, COF2, or COF3, in vivo. In some embodiments, the cell is contacted with COF1, COF2, or COF3, ex vivo.

[1436] As used herein, “selectively degrading” a fusion polypeptide or target polypeptide, or the like, refers to an increase in degradation (e.g. an increased level and/or rate of degradation, e.g., at least 5%, 10%, 15%, 20%, 25%, 30%, 35%, 40%, 45%, 50%, 55%, 60%, 65%, 70%, 75%, 80%, 85%, 90%, 95%, 100%, 200%, 500%, 10 times, 100 times, 1,000 times, or higher) of the fusion polypeptide or target polypeptide, relative to a reference polypeptide, e.g., a polypeptide without the COF1/CRBN-, COF2/CRBN-, or COF3/CRBN-binding polypeptide.

[1437] Also provided herein are methods of selectively regulating (e.g., degrading) a fusion polypeptide comprising a COF1/CRBN-, COF2/CRBN-, or COF3/CRBN-binding polypeptide, a heterologous polypeptide, and a degradation domain. Such methods comprise one or more of the following steps:
[1438] i) contacting the fusion polypeptide or a cell comprising the fusion polypeptide with a stabilization compound, optionally wherein in the presence of the stabilization compound, the expression level of the fusion polypeptide is increased by at least, e.g., 1.5-, 2-, 3-, 4-, 5-, 10-, 20-, 30-, 40-, or 50-fold, compared to the expression level of the fusion polypeptide in the absence of the stabilization compound, e.g., as measured by an assay described herein, e.g., a Western blot analysis or a flow cytometry analysis, and
[1439] ii) contacting the fusion polypeptide or a cell comprising the fusion polypeptide with COF1, COF2 or COF3, optionally wherein in the presence of COF1, COF2, or COF3, the expression level of the fusion polypeptide is substantially decreased, e.g., by at least about 1, 2, 3, 4, 5, 6, 7, 8, 9, 10, 20, 30, 40, 50, 60, 70, 80, 90, or 100 percent, relative to the expression level of the fusion polypeptide after step i) and before step ii), e.g., as measured by an assay described herein, e.g., a Western blot analysis or a flow cytometry analysis.

[1440] In another aspect, the present disclosure provides methods comprising administering a fusion polypeptide of the invention as a therapy. Typically, such administration will be in the form of cells (e.g., autologous or allogeneic host cells) expressing the fusion polypeptide of invention to the subject. Accordingly, through administration of COF1, COF2, or COF3 (either in vivo or ex vivo), the expression of the therapeutic (e.g., the heterologous protein) can be regulated. Accordingly, through administration of COF1, COF2, or COF3 (either in vivo or ex vivo), the expression of the therapeutic (e.g., the heterologous protein) can be regulated. Thus, expression of known synthetic therapeutic proteins or transmembrane receptors (e.g., a fusion polypeptide, e.g., as described herein, e.g., comprising a domain that includes a CAR molecule described herein) can be regulated. In one embodiment, the subject has a disorder described herein, e.g., the subject has cancer, e.g., the subject has a cancer which expresses a target antigen described herein. In one embodiment, the subject is a human.

[1441] Provided herein are methods of treating a subject having a disease associated with expression of a tumor antigen by administering to the subject an effective amount of a cell, e.g., a host cell, comprising any of the fusion polypeptides described herein or a nucleic acid encoding such a fusion polypeptide. In some embodiments, the fusion polypeptide comprises a chimeric antigen receptor (CAR), which comprises, in an N-terminal to C-terminal direction, an antigen binding domain that specifically binds the tumor antigen, a transmembrane domain, and one or more intracellular signaling domains. In some embodiments, the host cell is autologous to the subject. In some embodiments, the host cell is allogenic to said subject. In some embodiments, the host cell is contacted with COF1, COF2, or COF3.

[1442] In yet another aspect, the invention features a method of treating a subject having a disease associated with expression of a tumor antigen (e.g., an antigen described herein), comprising administering to the subject an effective amount of a cell, e.g., an immune effector cell (e.g., a population of immune effector cells) comprising a fusion polypeptide comprising a CAR molecule, wherein the CAR molecule comprises an antigen binding domain, a transmembrane domain, and an intracellular domain, said intracellular domain comprises a costimulatory domain and/or a primary signaling domain, wherein said antigen binding domain binds to the tumor antigen associated with the disease, e.g. a tumor antigen as described herein.

[1443] In a related aspect, the invention features a method of treating a subject having a disease associated with expression of a tumor antigen. The method comprises administering to the subject an effective amount of a cell, e.g., an immune effector cell (e.g., a population of immune effector cells), comprising a fusion polypeptide comprising a CAR molecule, in combination with an agent that increases the efficacy of the immune cell, wherein:
[1444] the agent that increases the efficacy of the immune cell is chosen from one or more of:
[1445] (i) a protein phosphatase inhibitor;
[1446] (ii) a kinase inhibitor;
[1447] (iii) a cytokine;
[1448] (iv) an inhibitor of an immune inhibitory molecule; or
[1449] (v) an agent that decreases the level or activity of a T_{REG} cell.

[1450] In another aspect, the invention features a composition comprising an immune effector cell (e.g., a population of immune effector cells) comprising a fusion polypeptide comprising a CAR molecule (e.g., a fusion polypeptide comprising a CAR molecule as described herein) for use in the treatment of a subject having a disease associated with expression of a tumor antigen, e.g., a disorder as described herein.

[1451] In certain embodiments of any of the aforesaid methods or uses, the disease associated with a tumor antigen, e.g., a tumor antigen described herein, is selected from a proliferative disease such as a cancer or malignancy or a precancerous condition such as a myelodysplasia, a myelodysplastic syndrome or a preleukemia, or is a non-cancer related indication associated with expression of a tumor antigen described herein. In one embodiment, the disease is a cancer described herein, e.g., a cancer described herein as being associated with a target described herein. In one embodiment, the disease is a hematologic cancer.

[1452] In one embodiment, the hematologic cancer is leukemia. In one embodiment, the cancer is selected from the group consisting of one or more acute leukemias including but not limited to B-cell acute lymphoid leukemia (“BALL”), T-cell acute lymphoid leukemia (“TALL”), acute lymphoid leukemia (ALL); one or more chronic leukemias including but not limited to chronic myelogenous leukemia (CML), chronic lymphocytic leukemia (CLL); additional hematologic cancers or hematologic conditions including, but not limited to B cell prolymphocytic leukemia, blastic plasmacytoid dendritic cell neoplasm, Burkitt's lymphoma, diffuse large B cell lymphoma, follicular lymphoma, hairy cell leukemia, small cell- or a large cell-follicular lymphoma, malignant lymphoproliferative conditions, MALT lymphoma, mantle cell lymphoma, Marginal zone lymphoma, multiple myeloma, myelodysplasia and myelodysplastic syndrome, non-Hodgkin lymphoma, Hodgkin lymphoma, plasmablastic lymphoma, plasmacytoid dendritic cell neoplasm, Waldenstrom macroglobulinemia, and “preleukemia” which are a diverse collection of hematological conditions united by ineffective production (or dysplasia) of myeloid blood cells, and to disease associated with expression of a tumor antigen described herein include, but not limited to, atypical and/or non-classical cancers, malignancies, precancerous conditions or proliferative diseases expressing a tumor antigen as described herein; and any combination thereof. In another embodiment, the disease associated with a tumor antigen described herein is a solid tumor.

[1453] In certain embodiments, the methods or uses are carried out in combination with an agent that increases the efficacy of the immune effector cell, e.g., an agent as described herein. In any of the aforesaid methods or uses, the disease associated with expression of the tumor antigen is selected from the group consisting of a proliferative disease, a precancerous condition, a cancer, and a non-cancer related indication associated with expression of the tumor antigen.

[1454] The cancer can be a hematologic cancer, e.g., a cancer chosen from one or more of chronic lymphocytic leukemia (CLL), acute leukemias, acute lymphoid leukemia (ALL), B-cell acute lymphoid leukemia (B-ALL), T-cell acute lymphoid leukemia (T-ALL), chronic myelogenous leukemia (CML), B cell prolymphocytic leukemia, blastic plasmacytoid dendritic cell neoplasm, Burkitt's lymphoma, diffuse large B cell lymphoma, follicular lymphoma, hairy cell leukemia, small cell- or a large cell-follicular lymphoma, malignant lymphoproliferative conditions, MALT lymphoma, mantle cell lymphoma, marginal zone lymphoma, multiple myeloma, myelodysplasia and myelodysplastic syndrome, non-Hodgkin's lymphoma, Hodgkin's lymphoma, plasmablastic lymphoma, plasmacytoid dendritic cell neoplasm, Waldenstrom macroglobulinemia, or pre-leukemia.

[1455] The cancer can also be chosen from colon cancer, rectal cancer, renal-cell carcinoma, liver cancer, non-small cell carcinoma of the lung, cancer of the small intestine, cancer of the esophagus, melanoma, bone cancer, pancreatic cancer, skin cancer, cancer of the head or neck, cutaneous or intraocular malignant melanoma, uterine cancer, ovarian cancer, rectal cancer, cancer of the anal region, stomach cancer, testicular cancer, uterine cancer, carcinoma of the fallopian tubes, carcinoma of the endometrium, carcinoma of the cervix, carcinoma of the vagina, carcinoma of the vulva, Hodgkin's Disease, non-Hodgkin's lymphoma, cancer of the endocrine system, cancer of the thyroid gland, cancer of the parathyroid gland, cancer of the adrenal gland, sarcoma of soft tissue, cancer of the urethra, cancer of the penis, solid tumors of childhood, cancer of the bladder, cancer of the kidney or ureter, carcinoma of the renal pelvis, neoplasm of the central nervous system (CNS), primary CNS lymphoma, tumor angiogenesis, spinal axis tumor, brain stem glioma, pituitary adenoma, Kaposi's sarcoma, epidermoid cancer, squamous cell cancer, T-cell lymphoma, environmentally induced cancers, combinations of said cancers, and metastatic lesions of said cancers.

[1456] In certain embodiments of the methods or uses described herein, the cell is administered in combination with an agent that increases the efficacy of the cell, e.g., one or more of a protein phosphatase inhibitor, a kinase inhibitor, a cytokine, an inhibitor of an immune inhibitory molecule; or an agent that decreases the level or activity of a T_{REG} cell.

[1457] In certain embodiments of the methods or uses described herein, the protein phosphatase inhibitor is a SHP-1 inhibitor and/or an SHP-2 inhibitor.

[1458] In other embodiments of the methods or uses described herein, kinase inhibitor is chosen from one or more of a CDK4 inhibitor, a CDK4/6 inhibitor (e.g., palbociclib), a BTK inhibitor (e.g., ibrutinib or RN-486), an mTOR inhibitor (e.g., rapamycin or everolimus (RAD001)), an MNK inhibitor, or a dual P13K/mTOR inhibitor. In one embodiment, the BTK inhibitor does not reduce or inhibit the kinase activity of interleukin-2-inducible kinase (ITK).

[1459] In other embodiments of the methods or uses described herein, the agent that inhibits the immune inhibitory molecule comprises an antibody or antibody fragment, an inhibitory nucleic acid, a clustered regularly interspaced short palindromic repeats (CRISPR), a transcription-activator like effector nuclease (TALEN), or a zinc finger endonuclease (ZFN) that inhibits the expression of the inhibitory molecule.

[1460] In other embodiments of the methods or uses described herein, the agent that decreases the level or activity of the TREG cells is chosen from cyclophosphamide, anti-GITR antibody, CD25-depletion, or a combination thereof.

[1461] In certain embodiments of the methods or uses described herein, the immune inhibitory molecule is selected from the group consisting of PD1, PD-L1, CTLA-4, TIM-3, LAG-3, VISTA, BTLA, TIGIT, LAIR1, CD160, 2B4, TGFR beta, CEACAM-1, CEACAM-3, and CEACAM-5.

[1462] In other embodiments, the agent that inhibits the inhibitory molecule comprises a first polypeptide comprising an inhibitory molecule or a fragment thereof and a second polypeptide that provides a positive signal to the cell, and wherein the first and second polypeptides are expressed on the CAR-containing immune cells, wherein (i) the first polypeptide comprises PD1, PD-L1, CTLA-4, TIM-3, LAG3, VISTA, BTLA, TIGIT, LAIR1, CD160, 2B4, TGFR beta, CEACAM-1, CEACAM-3, and CEACAM-5 or a fragment thereof; and/or (ii) the second polypeptide comprises an intracellular signaling domain comprising a primary signaling domain and/or a costimulatory signaling domain. In one embodiment, the primary signaling domain comprises a functional domain of CD3 zeta; and/or the costimulatory signaling domain comprises a functional domain of a protein selected from 41BB, CD27 and CD28.

In other embodiments, the cytokine is chosen from IL-7, IL-15, IL-18, or IL-21, or a combination thereof.

[1463] In other embodiments, the immune effector cell comprising the fusion polypeptide and a second, e.g., any of the combination therapies disclosed herein (e.g., the agent that that increases the efficacy of the immune effector cell) are administered substantially simultaneously or sequentially.

[1464] In other embodiments, the immune cell comprising the fusion polypeptide is administered in combination with a molecule that targets GITR and/or modulates GITR function. In certain embodiments, the molecule targeting GITR and/or modulating GITR function is administered prior to the CAR-expressing cell or population of cells, or prior to apheresis.

[1465] In one embodiment, lymphocyte infusion, for example allogeneic lymphocyte infusion, is used in the treatment of the cancer, wherein the lymphocyte infusion comprises at least one CAR-expressing cell of the present invention. In one embodiment, autologous lymphocyte infusion is used in the treatment of the cancer, wherein the autologous lymphocyte infusion comprises at least one CAR-expressing cell described herein.

[1466] In one embodiment, the cell is a T cell and the T cell is diaglycerol kinase (DGK) deficient. In one embodiment, the cell is a T cell and the T cell is Ikaros deficient. In one embodiment, the cell is a T cell and the T cell is both DGK and Ikaros deficient.

[1467] In one embodiment, the method includes administering a cell expressing the fusion polypeptide comprising a CAR molecule, as described herein, in combination with an agent which enhances the activity of a CAR-expressing cell, wherein the agent is a cytokine, e.g., IL-7, IL-15, IL-18, IL-21, or a combination thereof. The cytokine can be delivered in combination with, e.g., simultaneously or shortly after, administration of the CAR-expressing cell. Alternatively, the cytokine can be delivered after a prolonged period of time after administration of the CAR-expressing cell, e.g., after assessment of the subject's response to the CAR-expressing cell. In one embodiment the cytokine is administered to the subject simultaneously (e.g., administered on the same day) with or shortly after administration (e.g., administered 1 day, 2 days, 3 days, 4 days, 5 days, 6 days, or 7 days after administration) of the cell or population of cells described herein. In other embodiments, the cytokine is administered to the subject after a prolonged period of time (e.g., at least 2 weeks, 3 weeks, 4 weeks, 6 weeks, 8 weeks, 10 weeks, or more) after administration of the cell or population of cells described herein, or after assessment of the subject's response to the cell.

[1468] In other embodiments, the cells expressing a fusion polypeptide comprising a CAR molecule are administered in combination with an agent that ameliorates one or more side effects associated with administration of a cell expressing a CAR molecule. Side effects associated with the CAR-expressing cell can be chosen from cytokine release syndrome (CRS) or hemophagocytic lymphohistiocytosis (HLH).

[1469] In embodiments of any of the aforesaid methods or uses, the cells expressing the CAR molecule are administered in combination with an agent that treats the disease associated with expression of the tumor antigen, e.g., any of the second or third therapies disclosed herein.

[1470] Additional exemplary combinations include one or more of the following.

[1471] In another embodiment, the cell expressing the CAR molecule, e.g., as described herein, can be administered in combination with another agent, e.g., a kinase inhibitor and/or checkpoint inhibitor described herein. In an embodiment, a cell expressing the CAR molecule can further express another agent, e.g., an agent which enhances the activity of a CAR-expressing cell.

[1472] For example, in one embodiment, the agent that enhances the activity of a CAR-expressing cell can be an agent which inhibits an inhibitory molecule (e.g., an immune inhibitor molecule). Examples of inhibitory molecules include PD1, PD-L1, CTLA-4, TIM-3, CEACAM (e.g., CEACAM-1, CEACAM-3 and/or CEACAM-5), LAG-3, VISTA, BTLA, TIGIT, LAIR1, CD160, 2B4 and TGFR beta.

[1473] In one embodiment, the agent that inhibits the inhibitory molecule is an inhibitory nucleic acid is a dsRNA, a siRNA, or a shRNA. In embodiments, the inhibitory nucleic acid is linked to the nucleic acid that encodes a component of the CAR molecule. For example, the inhibitory molecule can be expressed on the CAR-expressing cell.

[1474] In another embodiment, the agent which inhibits an inhibitory molecule is a molecule described herein, e.g., an agent that comprises a first polypeptide, e.g., an inhibitory molecule, associated with a second polypeptide that provides a positive signal to the cell, e.g., an intracellular signaling domain described herein. In one embodiment, the agent comprises a first polypeptide, e.g., of an inhibitory molecule such as PD-1, PD-L1, CTLA-4, TIM-3, CEACAM (e.g., CEACAM-1, CEACAM-3 and/or CEACAM-5), LAG-3, VISTA, BTLA, TIGIT, LAIR1, CD160, 2B4 or TGFR beta, or a fragment of any of these (e.g., at least a portion of the extracellular domain of any of these), and a second polypeptide which is an intracellular signaling domain described herein (e.g., comprising a costimulatory domain (e.g., 41BB, CD27 or CD28, e.g., as described herein) and/or a primary signaling domain (e.g., a CD3 zeta signaling domain described herein). In one embodiment, the agent comprises a first polypeptide of PD1 or a fragment thereof (e.g., at least a portion of the extracellular domain of PD1), and a second polypeptide of an intracellular signaling domain described herein (e.g., a CD28 signaling domain described herein and/or a CD3 zeta signaling domain described herein).

[1475] In one embodiment, the cell of the present invention, e.g., T cell or NK cell, is administered to a subject that has received a previous stem cell transplantation, e.g., autologous stem cell transplantation.

[1476] In one embodiment, the cell of the present invention, e.g., T cell or NK cells, is administered to a subject that has received a previous dose of melphalan.

[1477] In one embodiment, the cell expressing a fusion polypeptide comprising a CAR molecule, e.g., a CAR molecule described herein, is administered in combination with an agent that increases the efficacy of a cell expressing a CAR molecule, e.g., an agent described herein.

[1478] In one embodiment, the cells expressing a fusion polypeptide comprising a CAR molecule, e.g., a CAR molecule described herein, are administered in combination with a low, immune enhancing dose of an mTOR inhibitor. While not wishing to be bound by theory, it is believed that treatment with a low, immune enhancing, dose (e.g., a dose that is insufficient to completely suppress the immune system but sufficient to improve immune function) is accompanied by a decrease in PD-1 positive T cells or an increase in PD-1 negative cells. PD-1 positive T cells, but not PD-1 negative T cells, can be exhausted by engagement with cells which express a PD-1 ligand, e.g., PD-L1 or PD-L2.

[1479] In an embodiment this approach can be used to optimize the performance of CAR cells described herein in the subject. While not wishing to be bound by theory, it is believed that, in an embodiment, the performance of endogenous, non-modified immune effector cells, e.g., T cells or NK cells, is improved. While not wishing to be bound by theory, it is believed that, in an embodiment, the performance of a target antigen CAR-expressing cell is improved. In other embodiments, cells, e.g., T cells or NK cells, which have, or will be engineered to express a CAR, can be treated ex vivo by contact with an amount of an mTOR inhibitor that increases the number of PD1 negative immune effector cells, e.g., T cells or increases the ratio of PD1 negative immune effector cells, e.g., T cells/PD1 positive immune effector cells, e.g., T cells.

[1480] In an embodiment, administration of a low, immune enhancing, dose of an mTOR inhibitor, e.g., an allosteric inhibitor, e.g., RAD001, or a catalytic inhibitor, is initiated prior to administration of an CAR expressing cell described herein, e.g., T cells or NK cells. In an embodiment, the CAR cells are administered after a sufficient time, or sufficient dosing, of an mTOR inhibitor, such that the level of PD1 negative immune effector cells, e.g., T cells or NK cells, or the ratio of PD1 negative immune effector cells, e.g., T cells/PD1 positive immune effector cells, e.g., T cells, has been, at least transiently, increased.

[1481] In an embodiment, the cell, e.g., T cell or NK cell, to be engineered to express a CAR, is harvested after a sufficient time, or after sufficient dosing of the low, immune enhancing, dose of an mTOR inhibitor, such that the level of PD1 negative immune effector cells, e.g., T cells, or the ratio of PD1 negative immune effector cells, e.g., T cells/PD1 positive immune effector cells, e.g., T cells, in the subject or harvested from the subject has been, at least transiently, increased.

[1482] In one embodiment, the cell expressing a fusion polypeptide comprising a CAR molecule, e.g., a CAR molecule described herein, is administered in combination with an agent that ameliorates one or more side effect associated with administration of a cell expressing a CAR molecule, e.g., an agent described herein.

[1483] In one embodiment, the cell expressing a fusion polypeptide comprising a CAR molecule, e.g., a CAR molecule described herein, is administered in combination with an agent that treats the disease associated with a cancer associated antigen as described herein, e.g., an agent described herein.

[1484] In one embodiment, a cell expressing two or more fusion polypeptides comprising CAR molecules, e.g., as described herein, is administered to a subject in need thereof to treat cancer. In one embodiment, a population of cells including a fusion polypeptide comprising a CAR expressing cell, e.g., as described herein, is administered to a subject in need thereof to treat cancer.

[1485] In one embodiment, the cell expressing a fusion polypeptide comprising a CAR molecule, e.g., a CAR molecule described herein, is administered at a dose and/or dosing schedule described herein.

[1486] In one embodiment, the fusion polypeptide comprising a CAR molecule is introduced into immune effector cells (e.g., T cells, NK cells), e.g., using in vitro transcription, and the subject (e.g., human) receives an initial administration of cells comprising a fusion polypeptide comprising a CAR molecule, and one or more subsequent administrations of cells comprising a fusion polypeptide comprising a CAR molecule, wherein the one or more subsequent administrations are administered less than 15 days, e.g., 14, 13, 12, 11, 10, 9, 8, 7, 6, 5, 4, 3, or 2 days after the previous administration. In one embodiment, more than one administration of cells comprising a fusion polypeptide comprising a CAR molecule are administered to the subject (e.g., human) per week, e.g., 2, 3, or 4 administrations of cells comprising a fusion polypeptide comprising a CAR molecule are administered per week. In one embodiment, the subject (e.g., human subject) receives more than one administration of cells comprising a fusion polypeptide comprising a CAR molecule per week (e.g., 2, 3 or 4 administrations per week) (also referred to herein as a cycle), followed by a week of no administration of cells comprising a fusion polypeptide comprising a CAR molecule, and then one or more additional administration of cells comprising a CAR molecule (e.g., more than one administration of the cells comprising a CAR molecule per week) is administered to the subject. In another embodiment, the subject (e.g., human subject) receives more than one cycle of cells comprising a fusion polypeptide comprising a CAR molecule, and the time between each cycle is less than 10, 9, 8, 7, 6, 5, 4, or 3 days. In one embodiment, the cells comprising a fusion polypeptide comprising a CAR molecule are administered every other day for 3 administrations per week. In one embodiment, the cells comprising a fusion polypeptide comprising a CAR molecule are administered for at least two, three, four, five, six, seven, eight or more weeks.

[1487] In one embodiment, the cells expressing a fusion polypeptide comprising a CAR molecule, e.g., a CAR molecule described herein, are administered as a first line treatment for the disease, e.g., the cancer, e.g., the cancer described herein. In another embodiment, the cells expressing a fusion polypeptide comprising a CAR molecule, e.g., a CAR molecule described herein, are administered as a second, third, fourth line treatment for the disease, e.g., the cancer, e.g., the cancer described herein.

[1488] In one embodiment, a population of cells described herein is administered.

[1489] In another aspect, the invention pertains to a cell expressing a fusion polypeptide comprising a CAR molecule described herein for use as a medicament in combination with a kinase inhibitor and/or a checkpoint inhibitor as described herein. In another aspect, the invention pertains to a kinase inhibitor and/or a checkpoint inhibitor described herein for use as a medicament in combination with a cell expressing a CAR molecule described herein.

[1490] In another aspect, the invention pertains to a cell expressing a fusion polypeptide comprising a CAR molecule described herein for use in combination with a cytokine, e.g., IL-7, IL-15 and/or IL-21 as described herein, in the treatment of a disease expressing a tumor antigen targeted by the CAR. In another aspect, the invention pertains to a cytokine described herein for use in combination with a cell expressing a fusion polypeptide comprising a CAR molecule described herein, in the treatment of a disease expressing a tumor antigen targeted by the CAR.

[1491] In another aspect, the invention pertains to a cell expressing a fusion polypeptide comprising a CAR molecule described herein for use in combination with a kinase inhibitor and/or a checkpoint inhibitor as described herein, in the treatment of a disease expressing a tumor antigen targeted by the CAR. In another aspect, the invention pertains to a kinase inhibitor and/or a checkpoint inhibitor described herein for use in combination with a cell expressing a fusion polypeptide comprising a CAR molecule described herein, in the treatment of a disease expressing a tumor antigen targeted by the CAR.

[1492] In another aspect, the present disclosure provides a method comprising administering a fusion polypeptide comprising a CAR molecule, e.g., a CAR molecule described herein, or a cell comprising a nucleic acid encoding a fusion polypeptide comprising a CAR molecule, e.g., a CAR molecule described herein. In one embodiment, the subject has a disorder described herein, e.g., the subject has cancer, e.g., the subject has a cancer and has tumor-supporting cells which express a tumor-supporting antigen described herein. In one embodiment, the subject is a human.

[1493] In one embodiment of the methods or uses described herein, the fusion polypeptide comprising CAR molecule is administered in combination with another agent. In one embodiment, the agent can be a kinase inhibitor, e.g., a CDK4/6 inhibitor, a BTK inhibitor, an mTOR inhibitor, a MNK inhibitor, or a dual PI3K/mTOR inhibitor, and combinations thereof. In one embodiment, the kinase inhibitor is a CDK4 inhibitor, e.g., a CDK4 inhibitor described herein, e.g., a CD4/6 inhibitor, such as, e.g., 6-Acetyl-8-cyclopentyl-5-methyl-2-(5-piperazin-1-yl-pyridin-2-ylamino)-8H-pyrido[2,3-d]pyrimidin-7-one, hydrochloride (also referred to as palbociclib or PD0332991). In one embodiment, the kinase inhibitor is a BTK inhibitor, e.g., a BTK inhibitor described herein, such as, e.g., ibrutinib. In one embodiment, the kinase inhibitor is an mTOR inhibitor, e.g., an mTOR inhibitor described herein, such as, e.g., rapamycin, a rapamycin analog, OSI-027. The mTOR inhibitor can be, e.g., an mTORC1 inhibitor and/or an mTORC2 inhibitor, e.g., an mTORC1 inhibitor and/or mTORC2 inhibitor described herein. In one embodiment, the kinase inhibitor is a MNK inhibitor, e.g., a MNK inhibitor described herein, such as, e.g., 4-amino-5-(4-fluoroanilino)-pyrazolo [3,4-d] pyrimidine. The MNK inhibitor can be, e.g., a MNK1a, MNK1b, MNK2a and/or MNK2b inhibitor. The dual PI3K/mTOR inhibitor can be, e.g., PF-04695102.

[1494] In one embodiment of the methods or uses described herein, the kinase inhibitor is a CDK4 inhibitor selected from aloisine A; flavopiridol or HMR-1275, 2-(2-chlorophenyl)-5,7-dihydroxy-8-[(3S,4R)-3-hydroxy-1-methyl-4-piperidinyl]-4-chromenone; crizotinib (PF-02341066; 2-(2-Chlorophenyl)-5,7-dihydroxy-8-[(2R,3S)-2-(hydroxymethyl)-1-methyl-3-pyrrolidinyl]-4H-1-benzopyran-4-one, hydrochloride (P276-00); 1-methyl-5-[[2-[5-(trifluoromethyl)-1H-imidazol-2-yl]-4-pyridinyl]oxy]-N-[4-(trifluoromethyl)phenyl]-1H-benzimidazol-2-amine (RAF265); indisulam (E7070); roscovitine (CYC202); palbociclib (PD0332991); dinaciclib (SCH727965); N-[5-[[(5-tert-butyloxazol-2-yl)methyl]thio]thiazol-2-yl]piperidine-4-carboxamide (BMS 387032); 4-[[9-chloro-7-(2,6-difluorophenyl)-5H-pyrimido[5,4-d] [2]benzazepin-2-yl]amino]-benzoic acid (MLN8054); 5-[3-(4,6-difluoro-1H-benzimidazol-2-yl)-1H-indazol-5-yl]-N-ethyl-4-methyl-3-pyridinemethanamine (AG-024322); 4-(2,6-dichlorobenzoylamino)-1H-pyrazole-3-carboxylic acid N-(piperidin-4-yl)amide (AT7519); 4-[2-methyl-1-(1-methylethyl)-1H-imidazol-5-yl]-N-[4-(methylsulfonyl)phenyl]-2-pyrimidinamine (AZD5438); and XL281 (BMS908662).

[1495] In one embodiment of the methods or uses described herein, the kinase inhibitor is a CDK4 inhibitor, e.g., palbociclib (PD0332991), and the palbociclib is administered at a dose of about 50 mg, 60 mg, 70 mg, 75 mg, 80 mg, 90 mg, 100 mg, 105 mg, 110 mg, 115 mg, 120 mg, 125 mg, 130 mg, 135 mg (e.g., 75 mg, 100 mg or 125 mg) daily for a period of time, e.g., daily for 14-21 days of a 28 day cycle, or daily for 7-12 days of a 21 day cycle. In one embodiment, 1, 2, 3, 4, 5, 6, 7, 8, 9, 10, 11, 12 or more cycles of palbociclib are administered.

[1496] In one embodiment of the methods or uses described herein, the kinase inhibitor is a BTK inhibitor selected from ibrutinib (PCI-32765); GDC-0834; RN-486; CGI-560; CGI-1764; HM-71224; CC-292; ONO-4059; CNX-774; and LFM-A13. In one embodiment, the BTK inhibitor does not reduce or inhibit the kinase activity of interleukin-2-inducible kinase (ITK), and is selected from GDC-0834; RN-486; CGI-560; CGI-1764; HM-71224; CC-292; ONO-4059; CNX-774; and LFM-A13.

[1497] In one embodiment of the methods or uses described herein, the kinase inhibitor is a BTK inhibitor, e.g., ibrutinib (PCI-32765), and the ibrutinib is administered at a dose of about 250 mg, 300 mg, 350 mg, 400 mg, 420 mg, 440 mg, 460 mg, 480 mg, 500 mg, 520 mg, 540 mg, 560 mg, 580 mg, 600 mg (e.g., 250 mg, 420 mg or 560 mg) daily for a period of time, e.g., daily for 21 day cycle, or daily for 28 day cycle. In one embodiment, 1, 2, 3, 4, 5, 6, 7, 8, 9, 10, 11, 12 or more cycles of ibrutinib are administered.

[1498] In one embodiment of the methods or uses described herein, the kinase inhibitor is a BTK inhibitor that does not inhibit the kinase activity of ITK, e.g., RN-486, and RN-486 is administered at a dose of about 100 mg, 110 mg, 120 mg, 130 mg, 140 mg, 150 mg, 160 mg, 170 mg, 180 mg, 190 mg, 200 mg, 210 mg, 220 mg, 230 mg, 240 mg, 250 mg (e.g., 150 mg, 200 mg or 250 mg) daily for a period of time, e.g., daily a 28 day cycle. In one embodiment, 1, 2, 3, 4, 5, 6, 7, or more cycles of RN-486 are administered.

[1499] In one embodiment of the methods or uses described herein, the kinase inhibitor is an mTOR inhibitor selected from temsirolimus; ridaforolimus (1R,2R,4S)-4-[(2R)-2 [(1R,9S,12S,15R,16E,18R,19R,21R, 23S,24E,26E,28Z,30S,32S,35R)-1,18-dihydroxy-19,30-dimethoxy-15,17,21,23, 29,35-hexamethyl-2,3,10,14,20-pentaoxo-11,36-dioxa-4-azatricyclo[30.3.1.04-9]hexatriaconta-16,24,26,28-tetraen-12-yl]propyl]-2-methoxycyclohexyl dimethylphosphinate, also known as AP23573 and MK8669; everolimus (RAD001); rapamycin (AY22989); simapimod; (5-{2,4-bis[(3S)-3-methylmorpholin-4-yl]pyrido[2,3-d]pyrimidin-7-yl}-2-methoxyphenyl)methanol (AZD8055); 2-amino-8-[trans-4-(2-hydroxyethoxy)cyclohexyl]-6-(6-methoxy-3-pyridinyl)-4-methyl-pyrido[2,3-d]pyrimidin-7(8H)-one (PF04691502); and N²-[1,4-dioxo-4-[[4-(4-oxo-8-phenyl-4H-1-benzopyran-2-yl)morpholinium-4-yl]methoxy]butyl]-L-arginylglycyl-L-α-aspartylL-serine- (SEQ ID NO: 836), inner salt (SF1126); and XL765.

[1500] In one embodiment of the methods or uses described herein, the kinase inhibitor is an mTOR inhibitor, e.g., rapamycin, and the rapamycin is administered at a dose of about 3 mg, 4 mg, 5 mg, 6 mg, 7 mg, 8 mg, 9 mg, 10 mg (e.g., 6 mg) daily for a period of time, e.g., daily for 21 day cycle, or daily for 28 day cycle. In one embodiment, 1, 2, 3, 4, 5, 6, 7, 8, 9, 10, 11, 12 or more cycles of rapamycin are administered. In one embodiment, the kinase inhibitor is an mTOR inhibitor, e.g., everolimus and the everolimus is administered at a dose of about 2 mg, 2.5 mg, 3 mg, 4 mg, 5 mg, 6 mg, 7 mg, 8 mg, 9 mg, 10 mg, 11 mg, 12 mg, 13 mg, 14 mg, 15 mg (e.g., 10 mg) daily for a period of time, e.g., daily for 28 day cycle. In one embodiment, 1, 2, 3, 4, 5, 6, 7, 8, 9, 10, 11, 12 or more cycles of everolimus are administered.

[1501] In one embodiment of the methods or uses described herein, the kinase inhibitor is an MNK inhibitor selected from CGP052088; 4-amino-3-(p-fluorophenylamino)-pyrazolo [3,4-d] pyrimidine (CGP57380); cercosporamide; ETC-1780445-2; and 4-amino-5-(4-fluoroanilino)-pyrazolo [3,4-d] pyrimidine.

[1502] In one embodiment of the methods or uses described herein, the kinase inhibitor is a dual phosphatidylinositol 3-kinase (PI3K) and mTOR inhibitor selected from 2-Amino-8-[trans-4-(2-hydroxyethoxy)cyclohexyl]-6-(6-methoxy-3-pyridinyl)-4-methyl-pyrido[2,3-d]pyrimidin-7(8H)-one (PF-04691502); N-[4-[[4-(Dimethylamino)-1-piperidinyl]carbonyl]phenyl]-N′-[4-(4,6-di-4-morpholinyl-1,3,5-triazin-2-yl)phenyl]urea (PF-05212384, PKI-587); 2-Methyl-2-{4-[3-methyl-2-oxo-8-(quinolin-3-yl)-2,3-dihydro-1H-imidazo[4,5-c]quinolin-1-yl]phenyl}propanenitrile (BEZ-235); apitolisib (GDC-0980, RG7422); 2,4-Difluoro-N-{2-(methyloxy)-5-[4-(4-pyridazinyl)-6-quinolinyl]-3-pyridinyl}benzenesulfonamide (GSK2126458); 8-(6-methoxypyridin-3-yl)-3-methyl-1-(4-(piperazin-1-yl)-3-(trifluoromethyl)phenyl)-1H-imidazo[4,5-c]quinolin-2(3H)-one Maleic acid (NVP-BGT226); 3-[4-(4-Morpholinylpyrido[3′,2′:4,5]furo[3,2-d]pyrimidin-2-yl]phenol (PI-103); 5-(9-isopropyl-8-methyl-2-morpholino-9H-purin-6-yl)pyrimidin-2-amine (VS-5584, SB2343); and N-[2-[(3,5-Dimethoxyphenyl)amino]quinoxalin-3-yl]-4-[(4-methyl-3-methoxyphenyl)carbonyl]aminophenylsulfonamide (XL765).

[1503] In one embodiment of the methods or uses described herein, a cell comprising a fusion polypeptide described herein is administered to a subject in combination with a protein tyrosine phosphatase inhibitor, e.g., a protein tyrosine phosphatase inhibitor described herein. In one embodiment, the protein tyrosine phosphatase inhibitor is an SHP-1 inhibitor, e.g., an SHP-1 inhibitor described herein, such as, e.g., sodium stibogluconate. In one embodiment, the protein tyrosine phosphatase inhibitor is an SHP-2 inhibitor.

[1504] In one embodiment of the methods or uses described herein, a cell comprising a fusion polypeptide described herein is administered in combination with another agent, and the agent is a cytokine. The cytokine can be, e.g., IL-7, IL-15, IL-21, or a combination thereof. In another embodiment, a cell comprising a fusion polypeptide described herein is administered in combination with a checkpoint inhibitor, e.g., a checkpoint inhibitor described herein. For example, in one embodiment, the check point inhibitor inhibits an inhibitory molecule selected from PD-1, PD-L1, CTLA-4, TIM-3, CEACAM (e.g., CEACAM-1, CEACAM-3 and/or CEACAM-5), LAG-3, VISTA, BTLA, TIGIT, LAIR1, CD160, 2B4 and TGFR beta.

[1505] In one aspect, the fusion polypeptide described herein can be used to eradicate a normal cell that express a tumor antigen as described herein, thereby applicable for use as a cellular conditioning therapy prior to cell transplantation. In one aspect, the normal cell that expresses a tumor antigen as described herein is a normal stem cell and the cell transplantation is a stem cell transplantation.

### Checkpoint Inhibitors

[1506] In other embodiments of the methods or uses described herein, a cell comprising a fusion polypeptide described herein is administered in combination with another agent, and the agent is an inhibitor of a checkpoint inhibitor, e.g., a PD-1 inhibitor, PD-L1 inhibitor, a TIM-3 inhibitor, a LAG-3 inhibitor. Exemplary inhibitors are disclosed in more detail herein below.

### PD-1 Inhibitors

[1507] In certain embodiments, the inhibitor of the checkpoint inhibitor is a PD-1 inhibitor. In some embodiments, the PD-1 inhibitor is chosen from PDR001 (Novartis), Nivolumab (Bristol-Myers Squibb), Pembrolizumab (Merck & Co), Pidilizumab (CureTech), MEDI0680 (Medimmune), REGN2810 (Regeneron), TSR-042 (Tesaro), PF-06801591 (Pfizer), BGB-A317 (Beigene), BGB-108 (Beigene), INCSHR1210 (Incyte), or AMP-224 (Amplimmune).

### Exemplary PD-1 Inhibitors

[1508] In one embodiment, the PD-1 inhibitor is an anti-PD-1 antibody molecule. In one embodiment, the PD-1 inhibitor is an anti-PD-1 antibody molecule as described in US 2015/0210769, published on Jul. 30, 2015, entitled “Antibody Molecules to PD-1 and Uses Thereof,” incorporated by reference in its entirety. The antibody molecules described herein can be made by vectors, host cells, and methods described in US 2015/0210769, incorporated by reference in its entirety.

### Other Exemplary PD-1 Inhibitors

[1509] In one embodiment, the anti-PD-1 antibody molecule is Nivolumab (Bristol-Myers Squibb), also known as MDX-1106, MDX-1106-04, ONO-4538, BMS-936558, or OPDIVO®. Nivolumab (clone 5C4) and other anti-PD-1 antibodies are disclosed in U.S. Pat. No. 8,008,449 and WO 2006/121168, incorporated by reference in their entireties.

[1510] In one embodiment, the anti-PD-1 antibody molecule is Pembrolizumab (Merck & Co), also known as Lambrolizumab, MK-3475, MK03475, SCH-900475, or KEYTRUDA®. Pembrolizumab and other anti-PD-1 antibodies are disclosed in Hamid, O. et al. (2013) New England Journal of Medicine 369 (2): 134-44, U.S. Pat. No. 8,354,509, and WO 2009/114335, incorporated by reference in their entireties.

[1511] In one embodiment, the anti-PD-1 antibody molecule is Pidilizumab (CureTech), also known as CT-011. Pidilizumab and other anti-PD-1 antibodies are disclosed in Rosenblatt, J. et al. (2011) J Immunotherapy 34(5): 409-18, U.S. Pat. Nos. 7,695,715, 7,332,582, and 8,686,119, incorporated by reference in their entireties.

[1512] In one embodiment, the anti-PD-1 antibody molecule is MEDI0680 (Medimmune), also known as AMP-514. MEDI0680 and other anti-PD-1 antibodies are disclosed in U.S. Pat. No. 9,205,148 and WO 2012/145493, incorporated by reference in their entireties. In one embodiment, the anti-PD-1 antibody molecule comprises one or more of the CDR sequences (or collectively all of the CDR sequences), the heavy chain or light chain variable region sequence, or the heavy chain or light chain sequence of MEDI0680.

[1513] In one embodiment, the anti-PD-1 antibody molecule is REGN2810 (Regeneron). In one embodiment, the anti-PD-1 antibody molecule comprises one or more of the CDR sequences (or collectively all of the CDR sequences), the heavy chain or light chain variable region sequence, or the heavy chain or light chain sequence of REGN2810.

[1514] In one embodiment, the anti-PD-1 antibody molecule is PF-06801591 (Pfizer). In one embodiment, the anti-PD-1 antibody molecule comprises one or more of the CDR sequences (or collectively all of the CDR sequences), the heavy chain or light chain variable region sequence, or the heavy chain or light chain sequence of PF-06801591.

[1515] In one embodiment, the anti-PD-1 antibody molecule is BGB-A317 or BGB-108 (Beigene). In one embodiment, the anti-PD-1 antibody molecule comprises one or more of the CDR sequences (or collectively all of the CDR sequences), the heavy chain or light chain variable region sequence, or the heavy chain or light chain sequence of BGB-A317 or BGB-108.

[1516] In one embodiment, the anti-PD-1 antibody molecule is INCSHR1210 (Incyte), also known as INCSHR01210 or SHR-1210. In one embodiment, the anti-PD-1 antibody molecule comprises one or more of the CDR sequences (or collectively all of the CDR sequences), the heavy chain or light chain variable region sequence, or the heavy chain or light chain sequence of INCSHR1210.

[1517] In one embodiment, the anti-PD-1 antibody molecule is TSR-042 (Tesaro), also known as ANB011. In one embodiment, the anti-PD-1 antibody molecule comprises one or more of the CDR sequences (or collectively all of the CDR sequences), the heavy chain or light chain variable region sequence, or the heavy chain or light chain sequence of TSR-042.

[1518] Further known anti-PD-1 antibodies include those described, e.g., in WO 2015/112800, WO 2016/092419, WO 2015/085847, WO 2014/179664, WO 2014/194302, WO 2014/209804, WO 2015/200119, U.S. Pat. Nos. 8,735,553, 7,488,802, 8,927,697, 8,993,731, and 9,102,727, incorporated by reference in their entireties.

[1519] In one embodiment, the anti-PD-1 antibody is an antibody that competes for binding with, and/or binds to the same epitope on PD-1 as, one of the anti-PD-1 antibodies described herein.

[1520] In one embodiment, the PD-1 inhibitor is a peptide that inhibits the PD-1 signaling pathway, e.g., as described in U.S. Pat. No. 8,907,053, incorporated by reference in its entirety. In one embodiment, the PD-1 inhibitor is an immunoadhesin (e.g., an immunoadhesin comprising an extracellular or PD-1 binding portion of PD-L1 or PD-L2 fused to a constant region (e.g., an Fc region of an immunoglobulin sequence). In one embodiment, the PD-1 inhibitor is AMP-224 (B7-DCIg (Amplimmune), e.g., disclosed in WO 2010/027827 and WO 2011/066342, incorporated by reference in their entireties).

### PD-L1 Inhibitors

[1521] In certain embodiments, the inhibitor of the checkpoint inhibitor is a PD-L1 inhibitor. In some embodiments, the PD-L1 inhibitor is chosen from FAZ053 (Novartis), Atezolizumab (Genentech/Roche), Avelumab (Merck Serono and Pfizer), Durvalumab (MedImmune/AstraZeneca), or BMS-936559 (Bristol-Myers Squibb).

### Exemplary PD-L1 Inhibitors

[1522] In one embodiment, the PD-L1 inhibitor is an anti-PD-L1 antibody molecule. In one embodiment, the PD-L1 inhibitor is an anti-PD-L1 antibody molecule as disclosed in US 2016/0108123, published on Apr. 21, 2016, entitled “Antibody Molecules to PD-L1 and Uses Thereof,” incorporated by reference in its entirety. The antibody molecules described herein can be made by vectors, host cells, and methods described in US 2016/0108123, incorporated by reference in its entirety.

### Other Exemplary PD-L1 Inhibitors

[1523] In one embodiment, the anti-PD-L1 antibody molecule is Atezolizumab (Genentech/Roche), also known as MPDL3280A, RG7446, RO5541267, YW243.55.S70, or TECENTRIQ™. Atezolizumab and other anti-PD-L1 antibodies are disclosed in U.S. Pat. No. 8,217,149, incorporated by reference in its entirety.

[1524] In one embodiment, the anti-PD-L1 antibody molecule is Avelumab (Merck Serono and Pfizer), also known as MSB0010718C. Avelumab and other anti-PD-L1 antibodies are disclosed in WO 2013/079174, incorporated by reference in its entirety.

[1525] In one embodiment, the anti-PD-L1 antibody molecule is Durvalumab (MedImmune/AstraZeneca), also known as MEDI4736. Durvalumab and other anti-PD-L1 antibodies are disclosed in U.S. Pat. No. 8,779,108, incorporated by reference in its entirety.

[1526] In one embodiment, the anti-PD-L1 antibody molecule is BMS-936559 (Bristol-Myers Squibb), also known as MDX-1105 or 12A4. BMS-936559 and other anti-PD-L1 antibodies are disclosed in U.S. Pat. No. 7,943,743 and WO 2015/081158, incorporated by reference in their entireties.

[1527] Further known anti-PD-L1 antibodies include those described, e.g., in WO 2015/181342, WO 2014/100079, WO 2016/000619, WO 2014/022758, WO 2014/055897, WO 2015/061668, WO 2013/079174, WO 2012/145493, WO 2015/112805, WO 2015/109124, WO 2015/195163, U.S. Pat. Nos. 8,168,179, 8,552,154, 8,460,927, and 9,175,082, incorporated by reference in their entireties.

[1528] In one embodiment, the anti-PD-L1 antibody is an antibody that competes for binding with, and/or binds to the same epitope on PD-L1 as, one of the anti-PD-L1 antibodies described herein.

### LAG-3 Inhibitors

[1529] In certain embodiments, the inhibitor of the checkpoint inhibitor is a LAG-3 inhibitor. In some embodiments, the LAG-3 inhibitor is chosen from LAG525 (Novartis), BMS-986016 (Bristol-Myers Squibb), or TSR-033 (Tesaro).

### Exemplary LAG-3 Inhibitors

[1530] In one embodiment, the LAG-3 inhibitor is an anti-LAG-3 antibody molecule. In one embodiment, the LAG-3 inhibitor is an anti-LAG-3 antibody molecule as disclosed in US 2015/0259420, published on Sep. 17, 2015, entitled “Antibody Molecules to LAG-3 and Uses Thereof,” incorporated by reference in its entirety. The antibody molecules described herein can be made by vectors, host cells, and methods described in US 2015/0259420, incorporated by reference in its entirety.

### Other Exemplary LAG-3 Inhibitors

[1531] In one embodiment, the anti-LAG-3 antibody molecule is BMS-986016 (Bristol-Myers Squibb), also known as BMS986016. BMS-986016 and other anti-LAG-3 antibodies are disclosed in WO 2015/116539 and U.S. Pat. No. 9,505,839, incorporated by reference in their entireties.

[1532] In one embodiment, the anti-LAG-3 antibody molecule is TSR-033 (Tesaro). In one embodiment, the anti-LAG-3 antibody molecule comprises one or more of the CDR sequences (or collectively all of the CDR sequences), the heavy chain or light chain variable region sequence, or the heavy chain or light chain sequence of TSR-033.

[1533] In one embodiment, the anti-LAG-3 antibody molecule is IMP731 or GSK2831781 (GSK and Prima BioMed). IMP731 and other anti-LAG-3 antibodies are disclosed in WO 2008/132601 and U.S. Pat. No. 9,244,059, incorporated by reference in their entireties. In one embodiment, the anti-LAG-3 antibody molecule comprises one or more of the CDR sequences (or collectively all of the CDR sequences), the heavy chain or light chain variable region sequence, or the heavy chain or light chain sequence of IMP731. In one embodiment, the anti-LAG-3 antibody molecule comprises one or more of the CDR sequences (or collectively all of the CDR sequences), the heavy chain or light chain variable region sequence, or the heavy chain or light chain sequence of GSK2831781.

[1534] In one embodiment, the anti-LAG-3 antibody molecule is IMP761 (Prima BioMed). In one embodiment, the anti-LAG-3 antibody molecule comprises one or more of the CDR sequences (or collectively all of the CDR sequences), the heavy chain or light chain variable region sequence, or the heavy chain or light chain sequence of IMP761.

[1535] Further known anti-LAG-3 antibodies include those described, e.g., in WO 2008/132601, WO 2010/019570, WO 2014/140180, WO 2015/116539, WO 2015/200119, WO 2016/028672, U.S. Pat. Nos. 9,244,059, 9,505,839, incorporated by reference in their entireties.

[1536] In one embodiment, the anti-LAG-3 antibody is an antibody that competes for binding with, and/or binds to the same epitope on LAG-3 as, one of the anti-LAG-3 antibodies described herein.

[1537] In one embodiment, the anti-LAG-3 inhibitor is a soluble LAG-3 protein, e.g., IMP321 (Prima BioMed), e.g., as disclosed in WO 2009/044273, incorporated by reference in its entirety.

### TIM-3 Inhibitors

[1538] In certain embodiments, the inhibitor of the checkpoint inhibitor is a TIM-3 inhibitor. In some embodiments, the TIM-3 inhibitor is MGB453 (Novartis) or TSR-022 (Tesaro).

### Exemplary TIM-3 Inhibitors

[1539] In one embodiment, the TIM-3 inhibitor is an anti-TIM-3 antibody molecule. In one embodiment, the TIM-3 inhibitor is an anti-TIM-3 antibody molecule as disclosed in US 2015/0218274, published on Aug. 6, 2015, entitled “Antibody Molecules to TIM-3 and Uses Thereof,” incorporated by reference in its entirety.

[1540] The antibody molecules described herein can be made by vectors, host cells, and methods described in US 2015/0218274, incorporated by reference in its entirety.

### Other Exemplary TIM-3 Inhibitors

[1541] In one embodiment, the anti-TIM-3 antibody molecule is TSR-022 (AnaptysBio/Tesaro). In one embodiment, the anti-TIM-3 antibody molecule comprises one or more of the CDR sequences (or collectively all of the CDR sequences), the heavy chain or light chain variable region sequence, or the heavy chain or light chain sequence of TSR-022. In one embodiment, the anti-TIM-3 antibody molecule comprises one or more of the CDR sequences (or collectively all of the CDR sequences), the heavy chain or light chain variable region sequence, or the heavy chain or light chain sequence of APE5137 or APE5121. APE5137, APE5121, and other anti-TIM-3 antibodies are disclosed in WO 2016/161270, incorporated by reference in its entirety.

[1542] In one embodiment, the anti-TIM-3 antibody molecule is the antibody clone F38-2E2. In one embodiment, the anti-TIM-3 antibody molecule comprises one or more of the CDR sequences (or collectively all of the CDR sequences), the heavy chain or light chain variable region sequence, or the heavy chain or light chain sequence of F38-2E2.

[1543] Further known anti-TIM-3 antibodies include those described, e.g., in WO 2016/111947, WO 2016/071448, WO 2016/144803, U.S. Pat. Nos. 8,552,156, 8,841,418, and 9,163,087, incorporated by reference in their entireties.

[1544] In one embodiment, the anti-TIM-3 antibody is an antibody that competes for binding with, and/or binds to the same epitope on TIM-3 as, one of the anti-TIM-3 antibodies described herein.

### GITR Agonists

[1545] In certain embodiments, the fusion polypeptide is administered in combination with a GITR agonist. In some embodiments, the GITR agonist is GWN323 (NVS), BMS-986156, MK-4166 or MK-1248 (Merck), TRX518 (Leap Therapeutics), INCAGN1876 (Incyte/Agenus), AMG 228 (Amgen) or INBRX-110 (Inhibrx).

### Exemplary GITR Agonists

[1546] In one embodiment, the GITR agonist is an anti-GITR antibody molecule. In one embodiment, the GITR agonist is an anti-GITR antibody molecule as described in WO 2016/057846, published on Apr. 14, 2016, entitled “Compositions and Methods of Use for Augmented Immune Response and Cancer Therapy,” incorporated by reference in its entirety.

[1547] The antibody molecules described herein can be made by vectors, host cells, and methods described in WO 2016/057846, incorporated by reference in its entirety.

### Other Exemplary GITR Agonists

[1548] In one embodiment, the anti-GITR antibody molecule is BMS-986156 (Bristol-Myers Squibb), also known as BMS 986156 or BMS986156. BMS-986156 and other anti-GITR antibodies are disclosed, e.g., in U.S. Pat. No. 9,228,016 and WO 2016/196792, incorporated by reference in their entireties. In one embodiment, the anti-GITR antibody molecule comprises one or more of the CDR sequences (or collectively all of the CDR sequences), the heavy chain or light chain variable region sequence, or the heavy chain or light chain sequence of BMS-986156.

[1549] In one embodiment, the anti-GITR antibody molecule is MK-4166 or MK-1248 (Merck). MK-4166, MK-1248, and other anti-GITR antibodies are disclosed, e.g., in U.S. Pat. No. 8,709,424, WO 2011/028683, WO 2015/026684, and Mahne et al. Cancer Res. 2017; 77(5):1108-1118, incorporated by reference in their entireties. In one embodiment, the anti-GITR antibody molecule comprises one or more of the CDR sequences (or collectively all of the CDR sequences), the heavy chain or light chain variable region sequence, or the heavy chain or light chain sequence of MK-4166 or MK-1248.

[1550] In one embodiment, the anti-GITR antibody molecule is TRX518 (Leap Therapeutics). TRX518 and other anti-GITR antibodies are disclosed, e.g., in U.S. Pat. Nos. 7,812,135, 8,388,967, 9,028,823, WO 2006/105021, and Ponte J et al. (2010) Clinical Immunology; 135:S96, incorporated by reference in their entireties. In one embodiment, the anti-GITR antibody molecule comprises one or more of the CDR sequences (or collectively all of the CDR sequences), the heavy chain or light chain variable region sequence, or the heavy chain or light chain sequence of TRX518.

[1551] In one embodiment, the anti-GITR antibody molecule is INCAGN1876 (Incyte/Agenus). INCAGN1876 and other anti-GITR antibodies are disclosed, e.g., in US 2015/0368349 and WO 2015/184099, incorporated by reference in their entireties. In one embodiment, the anti-GITR antibody molecule comprises one or more of the CDR sequences (or collectively all of the CDR sequences), the heavy chain or light chain variable region sequence, or the heavy chain or light chain sequence of INCAGN1876.

[1552] In one embodiment, the anti-GITR antibody molecule is AMG 228 (Amgen). AMG 228 and other anti-GITR antibodies are disclosed, e.g., in U.S. Pat. No. 9,464,139 and WO 2015/031667, incorporated by reference in their entireties. In one embodiment, the anti-GITR antibody molecule comprises one or more of the CDR sequences (or collectively all of the CDR sequences), the heavy chain or light chain variable region sequence, or the heavy chain or light chain sequence of AMG 228.

[1553] In one embodiment, the anti-GITR antibody molecule is INBRX-110 (Inhibrx). INBRX-110 and other anti-GITR antibodies are disclosed, e.g., in US 2017/0022284 and WO 2017/015623, incorporated by reference in their entireties. In one embodiment, the GITR agonist comprises one or more of the CDR sequences (or collectively all of the CDR sequences), the heavy chain or light chain variable region sequence, or the heavy chain or light chain sequence of INBRX-110.

[1554] In one embodiment, the GITR agonist (e.g., a fusion polypeptide) is MEDI 1873 (MedImmune), also known as MEDI1873. MEDI 1873 and other GITR agonists are disclosed, e.g., in US 2017/0073386, WO 2017/025610, and Ross et al. Cancer Res 2016; 76(14 Suppl): Abstract nr 561, incorporated by reference in their entireties. In one embodiment, the GITR agonist comprises one or more of an IgG Fc domain, a functional multimerization domain, and a receptor binding domain of a glucocorticoid-induced TNF receptor ligand (GITRL) of MEDI 1873.

[1555] Further known GITR agonists (e.g., anti-GITR antibodies) include those described, e.g., in WO 2016/054638, incorporated by reference in its entirety.

[1556] In one embodiment, the anti-GITR antibody is an antibody that competes for binding with, and/or binds to the same epitope on GITR as, one of the anti-GITR antibodies described herein.

[1557] In one embodiment, the GITR agonist is a peptide that activates the GITR signaling pathway. In one embodiment, the GITR agonist is an immunoadhesin binding fragment (e.g., an immunoadhesin binding fragment comprising an extracellular or GITR binding portion of GITRL) fused to a constant region (e.g., an Fc region of an immunoglobulin sequence).

### IL15/IL-15Ra Complexes

[1558] In certain embodiments, the fusion polypeptide is administered in combination with a IL-15/IL-15Ra complex. In some embodiments, the IL-15/IL-15Ra complex is chosen from NIZ985 (Novartis), ATL-803 (Altor) or CYP0150 (Cytune).

### Exemplary IL-15/IL-15Ra Complexes

[1559] In one embodiment, the IL-15/IL-15Ra complex comprises human IL-15 complexed with a soluble form of human IL-15Ra. The complex may comprise IL-15 covalently or noncovalently bound to a soluble form of IL-15Ra. In a particular embodiment, the human IL-15 is noncovalently bonded to a soluble form of IL-15Ra. In a particular embodiment, the human IL-15 of the composition comprises an amino acid sequence as described in WO 2014/066527, incorporated by reference in its entirety. The molecules described herein can be made by vectors, host cells, and methods described in WO 2007/084342, incorporated by reference in its entirety.

### Other Exemplary IL-15/IL-15Ra Complexes

[1560] In one embodiment, the IL-15/IL-15Ra complex is ALT-803, an IL-15/IL-15Ra Fc fusion polypeptide (IL-15N72D:IL-15RaSu/Fc soluble complex). ALT-803 is disclosed in WO 2008/143794, incorporated by reference in its entirety.

[1561] In one embodiment, the IL-15/IL-15Ra complex comprises IL-15 fused to the sushi domain of IL-15Ra (CYP0150, Cytune). The sushi domain of IL-15Ra refers to a domain beginning at the first cysteine residue after the signal peptide of IL-15Ra, and ending at the fourth cysteine residue after said signal peptide. The complex of IL-15 fused to the sushi domain of IL-15Ra is disclosed in WO 2007/04606 and WO 2012/175222, incorporated by reference in their entireties.

### Screening Methods

[1562] The present invention includes methods of identifying a genetic element associated with a specific biological phenotype, e.g., a genetic element associated with the development and/or progression of a disorder, e.g., cancer. The method including the steps of: (i) modulating the expression of a fusion polypeptide in a cell, e.g., a host cell, by exposing said cell to COF1, COF2, or COF3, (ii) selecting for the cells with a phenotype of interest, e.g., a phenotype associated with the development and/or progression of a disorder, e.g., cancer, and (iii) identifying the fusion polypeptide that induces the phenotype of interest, wherein exposure of the cell to COF1, COF2, or COF3 decreases, e.g., by at least about 1, 2, 3, 4, 5, 6, 7, 8, 9, 10, 20, 30, 40, 50, 60, 70, 80, 90, or 100 percent, the expression of said fusion polypeptide relative to the level of expression of said fusion polypeptide prior to exposure to COF1, COF2, or COF3.

### Methods of Treating a Subject

[1563] In some aspects, the disclosure provides a method of treating a patient, comprising administering a fusion polypeptide (e.g., comprising a COF1/CRBN-, COF2/CRBN-, or COF3/CRBN-binding polypeptide and a heterologous polypeptide of interest) or cells expressing the fusion polypeptide (e.g., CAR-expressing cells) manufactured as described herein, optionally in combination with one or more other therapies. In some aspects, the disclosure provides a method of treating a patient, comprising administering a reaction mixture comprising the fusion polypeptide or cells expressing the fusion polypeptide (e.g., CAR-expressing cells) as described herein, optionally in combination with one or more other therapies. In some aspects, the disclosure provides a method of shipping or receiving a reaction mixture comprising the fusion polypeptide or cells expressing the fusion polypeptide (e.g., CAR-expressing cells) as described herein.

[1564] In some aspects, the disclosure provides a method of treating a patient, comprising receiving the fusion polypeptide (e.g., comprising a COF1/CRBN-, COF2/CRBN-, or COF3/CRBN-binding polypeptide and a heterologous polypeptide of interest) or cells expressing the fusion polypeptide (e.g., CAR-expressing cells) that was manufactured as described herein, and further comprising administering the fusion polypeptide or cells expressing the fusion polypeptide (e.g., CAR-expressing cells) to the patient, optionally in combination with one or more other therapies. In some aspects, the disclosure provides a method of treating a patient, comprising manufacturing the fusion polypeptide or cells expressing the fusion polypeptide (e.g., CAR-expressing cells) as described herein, and further comprising administering the fusion polypeptide or cells expressing the fusion polypeptide (e.g., CAR-expressing cells) to the patient, optionally in combination with one or more other therapies. The other therapy may be, e.g., a cancer therapy such as chemotherapy.

[1565] The methods described herein can further include formulating the fusion polypeptide (e.g., comprising a COF1/CRBN-, COF2/CRBN-, or COF3/CRBN-binding polypeptide and a heterologous polypeptide of interest) or cells expressing the fusion polypeptide (e.g., CAR-expressing cells) in a pharmaceutical composition. Pharmaceutical compositions may comprise a fusion polypeptide or cells expressing the fusion polypeptide (e.g., CAR-expressing cells), e.g., a plurality of fusion polypeptides or cells expressing the fusion polypeptide (e.g., CAR-expressing cells), as described herein, in combination with one or more pharmaceutically or physiologically acceptable carriers, diluents or excipients. Such compositions may comprise buffers such as neutral buffered saline, phosphate buffered saline and the like; carbohydrates such as glucose, mannose, sucrose or dextrans, mannitol; proteins; polypeptides or amino acids such as glycine; antioxidants; chelating agents such as EDTA or glutathione; adjuvants (e.g., aluminum hydroxide); and preservatives. Compositions can be formulated, e.g., for intravenous administration.

[1566] In one embodiment, the pharmaceutical composition is substantially free of, e.g., there are no detectable levels of a contaminant, e.g., selected from the group consisting of endotoxin, mycoplasma, replication competent lentivirus (RCL), p24, VSV-G nucleic acid, HIV gag, residual anti-CD3/anti-CD28 coated beads, mouse antibodies, pooled human serum, bovine serum albumin, bovine serum, culture media components, vector packaging cell or plasmid components, a bacterium and a fungus. In one embodiment, the bacterium is at least one selected from the group consisting of Alcaligenes faecalis, Candida albicans, Escherichia coli, Haemophilus influenza, Neisseria meningitides, Pseudomonas aeruginosa, Staphylococcus aureus, Streptococcus pneumonia, and Streptococcus pyogenes group A.

[1567] When “an immunologically effective amount,” “an anti-cancer effective amount,” “a cancer-inhibiting effective amount,” or “therapeutic amount” is indicated, the precise amount of the compositions to be administered can be determined by a physician with consideration of individual differences in age, weight, tumor size, extent of infection or metastasis, and condition of the patient (subject). It can generally be stated that a pharmaceutical composition comprising the immune effector cells (e.g., T cells, NK cells) described herein may be administered at a dosage of 10⁴ to 10⁹ cells/kg body weight, in some instances 10⁵ to 10⁶ cells/kg body weight, including all integer values within those ranges. T cell compositions may also be administered multiple times at these dosages. The cells can be administered by using infusion techniques that are commonly known in immunotherapy (see, e.g., Rosenberg et al., New Eng. J. of Med. 319:1676, 1988).

[1568] In some embodiments, a dose of CAR cells (e.g., CD19 CAR cells) comprises about 1×10⁶, 1.1 20×10⁶, 2×10⁶, 3.6×10⁶, 5×10⁶, 1×10⁷, 1.8×10⁷, 2×10⁷, 5×10⁷, 1×10⁸, 2×10⁸, or 5×10⁸ cells/kg. In some embodiments, a dose of CAR cells (e.g., CD19 CAR cells) comprises at least about 1×10⁶, 1.1×10⁶, 2×10⁶, 3.6×10⁶, 5×10⁶, 1×10⁷, 1.8×10⁷, 2×10⁷, 5×10⁷, 1×10⁸, 2×10⁸, or 5×10⁸ cells/kg. In some embodiments, a dose of CAR cells (e.g., CD19 CAR cells) comprises up to about 1×10⁶, 1.1×10⁶, 2×10⁶,3.6×10⁶,5×10⁶, 1×10⁷, 1.8×10⁷,2×10⁷,5×10⁷, 1×10⁸,2×10⁸, or 5×10⁸ cells/kg. In some embodiments, a dose of CAR cells (e.g., CD19 CAR cells) comprises about 1.1×10⁶-1.8×10⁷ cells/kg. In some embodiments, a dose of CAR cells (e.g., CD19 CAR cells) comprises about 1×10⁷, 2×10⁷, 5×10⁷, 1×10⁸, 2×10⁸, 5×10⁸, 1×10⁹, 2×10⁹, or 5×10⁹ cells. In some embodiments, a dose of CAR cells (e.g., CD19 CAR cells) comprises at least about 1×10⁷, 2×10⁷, 5×10⁷, 1×10⁸, 2×10⁸, 5×10⁸, 1×10⁹, 2×10⁹, or 5×10⁹ cells. In some embodiments, a dose of CAR cells (e.g., CD19 CAR cells) comprises up to about 1×10⁷, 2×10⁷, 5×10⁷, 1×10⁸, 2×10⁸, 5×10⁸, 1×10⁹, 2×10⁹, or 5×10⁹ cells. In certain aspects, it may be desired to administer activated immune effector cells (e.g., T cells, NK cells) to a subject and then subsequently redraw blood (or have an apheresis performed), activate immune effector cells (e.g., T cells, NK cells) therefrom, and reinfuse the patient with these activated and expanded immune effector cells (e.g., T cells, NK cells). This process can be carried out multiple times every few weeks. In certain aspects, immune effector cells (e.g., T cells, NK cells) can be activated from blood draws of from 10 cc to 400 cc. In certain aspects, immune effector cells (e.g., T cells, NK cells) are activated from blood draws of 20 cc, 30 cc, 40 cc, 50 cc, 60 cc, 70 cc, 80 cc, 90 cc, or 100 cc.

[1569] In embodiments, the CAR-expressing cells (e.g., the CD19 CAR-expressing cells) are administered in a plurality of doses, e.g., a first dose, a second dose, and optionally a third dose. In embodiments, the method comprises treating a subject (e.g., an adult subject) having a cancer (e.g., acute lymphoid leukemia (ALL)), comprising administering to the subject a first dose, a second dose, and optionally one or more additional doses, each dose comprising immune effector cells expressing a CAR molecule, e.g., a CD19 CAR molecule.

[1570] In embodiments, the method comprises administering a dose of 2-5×10⁶ viable CAR-expressing cells/kg, wherein the subject has a body mass of less than 50 kg; or administering a dose of 1.0-2.5×10⁸ viable CAR-expressing cells, wherein the subject has a body mass of at least 50 kg.

[1571] In embodiments, a single dose is administered to the subject, e.g., pediatric subject.

[1572] In embodiments, the doses are administered on sequential days, e.g., the first dose is administered on day 1, the second dose is administered on day 2, and the optional third dose (if administered) is administered on day 3.

[1573] In embodiments, a fourth, fifth, or sixth dose, or more doses, are administered.

[1574] In embodiments, the first dose comprises about 10% of the total dose, the second dose comprises about 30% of the total dose, and the third dose comprises about 60% of the total dose, wherein the aforementioned percentages have a sum of 100%. In embodiments, the first dose comprises about 9-11%, 8-12%, 7-13%, or 5-15% of the total dose. In embodiments, the second dose comprises about 29-31%, 28-32%, 27-33%, 26-34%, 25-35%, 24-36%, 23-37%, 22-38%, 21-39%, or 20-40% of the total dose. In embodiments, the third dose comprises about 55-65%, 50-70%, 45-75%, or 40-80% of the total dose. In embodiments, the total dose refers to the total number of viable CAR-expressing cells administered over the course of 1 week, 2 weeks, 3 weeks, or 4 weeks. In some embodiments wherein two doses are administered, the total dose refers to the sum of the number of viable CAR-expressing cells administered to the subject in the first and second doses. In some embodiments wherein three doses are administered, the total dose refers to the sum of the number of viable CAR-expressing cells administered to the subject in the first, second, and third doses.

[1575] In embodiments, the dose is measured according to the number of viable CAR-expressing cells therein. CAR expression can be measured, e.g., by flow cytometry using an antibody molecule that binds the CAR molecule and a detectable label. Viability can be measured, e.g., by Cellometer.

[1576] In embodiments, the viable CAR-expressing cells are administered in ascending doses. In embodiments, the second dose is larger than the first dose, e.g., larger by 10%, 20%, 30%, or 50%. In embodiments, the second dose is twice, three times, four times, or five times the size of the first dose. In embodiments, the third dose is larger than the second dose, e.g., larger by 10%, 20%, 30%, or 50%. In embodiments, the third dose is twice, three times, four times, or five times the size of the second dose.

[1577] In certain embodiments, the method includes one, two, three, four, five, six, seven or all of a)-h) of the following:
[1578] a) the number of CAR-expressing, viable cells administered in the first dose is no more than ⅓, of the number of CAR-expressing, viable cells administered in the second dose;
[1579] b) the number of CAR-expressing, viable cells administered in the first dose is no more than 1/X, wherein X is 2, 3, 4, 5, 6, 7, 8, 9, 10, 15, 20, 30, 40 or 50, of the total number of CAR-expressing, viable cells administered;
[1580] c) the number of CAR-expressing, viable cells administered in the first dose is no more than 1×10⁷,2×10⁷,3×10⁷,4×10⁷,5×10⁷,6×10⁷,7×10⁷,8×10⁷,9×10⁷, 1×10⁸,2×10⁸,3×10⁸, 4×10⁸, or 5×10⁸ CAR-expressing, viable cells, and the second dose is greater than the first dose;
[1581] d) the number of CAR-expressing, viable cells administered in the second dose is no more than ½, of the number of CAR-expressing, viable cells administered in the third dose;
[1582] e) the number of CAR-expressing, viable cells administered in the second dose is no more than 1/Y, wherein Y is 2, 3, 4, 5, 6, 7, 8, 9, 10, 15, 20, 30, 40 or 50, of the total number of CAR-expressing, viable cells administered;
[1583] f) the number of CAR-expressing, viable cells administered in the second dose is no more than 1×10⁷, 2×10⁷, 3×10⁷, 4×10⁷, 5×10⁷, 6×10⁷, 7×10⁷, 8×10⁷, 9×10⁷, 1×10⁸, 2×10⁸, 3×10⁸, 4×10⁸, or 5×10⁸ CAR-expressing, viable cells, and the third dose is greater than the second dose;
[1584] h) the dosages and time periods of administration of the first, second, and optionally third doses are selected such that the subject experiences CRS at a level no greater than 4, 3, 2, or 1.

[1585] In embodiments, the total dose is about 5×10⁸ CAR-expressing, viable cells. In embodiments, the total dose is about 5×10⁷-5×10⁸ CAR-expressing, viable cells. In embodiments, the first dose is about 5×10⁷ (e.g., ±10%, 20%, or 30%) CAR-expressing, viable cells, the second dose is about 1.5×10⁸, (e.g., ±10%, 20%, or 30%) CAR-expressing, viable cells, and the third dose is about 3×10⁸ (e.g., ±10%, 20%, or 30%) CAR-expressing, viable cells.

[1586] In embodiments, the subject is evaluated for CRS after receiving a dose, e.g., after receiving the first dose, the second dose, and/or the third dose.

[1587] In embodiments, the subject receives a CRS treatment, e.g., tocilizumab, a corticosteroid, etanercept, or siltuximab. In embodiments, the CRS treatment is administered before or after the first dose of cells comprising the CAR molecule. In embodiments, the CRS treatment is administered before or after the second dose of cells comprising the CAR molecule. In embodiments, the CRS treatment is administered before or after the third dose of cells comprising the CAR molecule. In embodiments, the CRS treatment is administered between the first and second doses of cells comprising the CAR molecule, and/or between the second and third doses of cells comprising the CAR molecule.

[1588] The administration of the subject compositions may be carried out in any convenient manner. The compositions described herein may be administered to a patient trans arterially, subcutaneously, intradermally, intratumorally, intranodally, intramedullary, intramuscularly, by intravenous (i.v.) injection, or intraperitoneally, e.g., by intradermal or subcutaneous injection. The compositions of immune effector cells (e.g., T cells, NK cells) may be injected directly into a tumor, lymph node, or site of infection.

[1589] In an embodiment, cells expressing a CAR described herein are administered to a subject in combination with a molecule that decreases the T_{REG} cell population. Methods that decrease the number of (e.g., deplete) T_{REG} cells are known in the art and include, e.g., CD25 depletion, cyclophosphamide administration, and modulating GITR function. Without wishing to be bound by theory, it is believed that reducing the number of T_{REG} cells in a subject prior to apheresis or prior to administration of a CAR-expressing cell described herein reduces the number of unwanted immune cells (e.g., Tregs) in the tumor microenvironment and reduces the subject's risk of relapse.

[1590] In one embodiment, cells expressing a CAR described herein are administered to a subject in combination with a molecule targeting GITR and/or modulating GITR functions, such as a GITR agonist and/or a GITR antibody that depletes regulatory T cells (TREGS). In embodiments, cells expressing a CAR described herein are administered to a subject in combination with cyclophosphamide. In one embodiment, the GITR binding molecules and/or molecules modulating GITR functions (e.g., GITR agonist and/or Treg depleting GITR antibodies) are administered prior to administration of the CAR-expressing cell. For example, in one embodiment, the GITR agonist can be administered prior to apheresis of the cells. In embodiments, cyclophosphamide is administered to the subject prior to administration (e.g., infusion or re-infusion) of the CAR-expressing cell or prior to aphersis of the cells. In embodiments, cyclophosphamide and an anti-GITR antibody are administered to the subject prior to administration (e.g., infusion or re-infusion) of the CAR-expressing cell or prior to apheresis of the cells. In one embodiment, the subject has cancer (e.g., a solid cancer or a hematological cancer such as ALL or CLL). In an embodiment, the subject has CLL. In embodiments, the subject has ALL. In embodiments, the subject has a solid cancer, e.g., a solid cancer described herein. Exemplary GITR agonists include, e.g., GITR fusion polypeptides and anti-GITR antibodies (e.g., bivalent anti-GITR antibodies) such as, e.g., a GITR fusion polypeptide described in U.S. Pat. No. 6,111,090, European Patent No.: 090505B1, U.S. Pat. No. 8,586,023, PCT Publication Nos.: WO 2010/003118 and 2011/090754, or an anti-GITR antibody described, e.g., in U.S. Pat. No. 7,025,962, European Patent No.: 1947183B1, U.S. Pat. Nos. 7,812,135, 8,388,967, 8,591,886, European Patent No.: EP 1866339, PCT Publication No.: WO 2011/028683, PCT Publication No.: WO 2013/039954, PCT Publication No.: WO2005/007190, PCT Publication No.: WO 2007/133822, PCT Publication No.: WO2005/055808, PCT Publication No.: WO 99/40196, PCT Publication No.: WO 2001/03720, PCT Publication No.: WO99/20758, PCT Publication No.: WO2006/083289, PCT Publication No.: WO 2005/115451, U.S. Pat. No. 7,618,632, and PCT Publication No.: WO 2011/051726.

[1591] In one embodiment, a CAR expressing cell described herein is administered to a subject in combination with a GITR agonist, e.g., a GITR agonist described herein. In one embodiment, the GITR agonist is administered prior to the CAR-expressing cell. For example, in one embodiment, the GITR agonist can be administered prior to apheresis of the cells. In one embodiment, the subject has CLL.

### EXAMPLES

[1592] The invention is further described in detail by reference to the following experimental examples. These examples are provided for purposes of illustration only, and are not intended to be limiting unless otherwise specified. Thus, the invention should in no way be construed as being limited to the following examples, but rather, should be construed to encompass any and all variations which become evident as a result of the teaching provided herein.

### Example 1: Evaluation of an IKZF3-Based Degradation Tag by Luciferase Assay

[1593] In this example, an IKZF3-based degradation tag was tested for its ability to facilitate lenalidomide-dependent degradation of a target protein. The IKZF3-based degradation tag includes amino acid residues 136-180 and 236-249 of human IKZF3 and comprises the amino acid sequence of SEQ ID NO: 3. This tag is herein referred to as “IKZF3 136-180 and 236-249” or the “HilD-tag.” IKZF3 136-180 and 236-249 was fused to the N-terminus of NanoLuciferase through a 16GS linker GGGGSGGGGTGGGGSG (SEQ ID NO: 28) (FIG. 1A). A pNL1.1CMV vector encoding the IKZF3 136-180 and 236-249-tagged NanoLuciferase was reverse transfected into HEK293T cells using a total of 0 ng, 5 ng, 50 ng, or 250 ng DNA (DNA values here were based on a 384 well 25 μl transfection that was then scaled up to a 6 well dish).

[1594] Transfected cells received a 1-hour pre-treatment with 128 ng/mL cyclohexamide, 12.8 ng/mL cyclohexamide, or 10 μM MG132 prior to treatment with 0 μM, 1 μM, 10 μM, or 100 μM lenalidomide for 2, 4, or 6 hours. DMSO was included as a vehicle control. Luminescence was measured by reading each 384-well plate on a ViewLux® with 1-second and 5-second exposures. The data was imported into Spotfire® and visualizations were made by doing a NC3 normalization according to the following formula: 100*([Luminescence]/[DMSO]).

[1595] The degradation tag including amino acid residues 136-180 and 236-249 of IKZF3 can facilitate lenalidomide-dependent degradation of a target protein (FIG. 1B). IKZF3 136-180 and 236-249 facilitated lenalidomide-dependent degradation of NanoLuciferase observed at all concentrations of DNA tested. The most degradation (˜60%) was observed in cells transfected with 5 ng of DNA (FIG. 1B). Importantly, lenalidomide-dependent degradation was blocked by MG132 treatment, indicating that lenalidomide-dependent degradation of a target protein is proteasome dependent (FIG. 1B). No obvious reduction in lenalidomide-dependent degradation of NanoLuciferase was observed with cyclohexamide treatment (data not shown).

### Example 2: Evaluation of an IKZF3-Based Degradation Tag by Western Blot

[1596] IKZF3 136-180 and 236-249 facilitated lenalidomide-dependent degradation of NanoLuciferase was evaluated by Western blot. The pNL1.1CMV vector encoding the IKZF3 136-180 and 236-249-tagged NanoLuciferase described above was transfected into 293GT cells and 293GT cereblon (CRBN) knockout (KO) cells. Transfected cells were then treated with 100 μM, 10 μM, 1 μM, 0.1 μM, 0.01 μM, or 0.001 μM lenalidomide, or DMSO for one-hour at 37° C. Pre-treatment samples were treated with 10 μM MG132 for one-hour at 37° C. prior to treatment with 100 μM lenalidomide. Samples were pelleted, lysed, run on a protein gel, transferred to a membrane, probed with antibody and developed with film.

[1597] The data further show that IKZF3 136-180 and 236-249 could facilitate lenalidomide-dependent degradation of the target protein with increasing lenalidomide concentrations (IC50=−10 nM) (FIG. 2). Lenalidomide-dependent degradation of NanoLuciferase was not observed in transfected 293GT CRBN KO cells or in cells pre-treated with MG132 (FIG. 2). These data indicate that lenalidomide-dependent degradation of a target protein having an IKZF3 136-180 and 236-249 tag is CRBN and proteasome dependent.

### Example 3: Design and Evaluation of Variant IKZF3-Based Degradation Tags

[1598] To determine whether a shorter IKZF3-based degradation tag could facilitate lenalidomide-dependent degradation of a target protein, the following IKZF3-based degradation tags were designed: “IKZF3 136-180,” which included amino acid residues 136-180 of IKZF3 (a tag comprising the amino acid sequence of SEQ ID NO: 5); “IKZF3 145-170,” which included amino acid residues 145-170 of IKZF3 (a tag comprising the amino acid sequence of SEQ ID NO: 9); and “IKZF3 140-169,” which included amino acid residues 140-169 of IKZF3 (a tag comprising the amino acid sequence of SEQ ID NO: 24).

[1599] Additionally, the IKZF3-based degradation tags were modified using the following strategies:
[1600] (1) deleting N-terminal and/or C-terminal amino acid residues;
[1601] (2) replacing amino acid residues 236-249, which correspond to an alpha-helix of IKZF3, with the amino acid sequence of MALEKMALEKMALE (SEQ ID NO: 91); and/or
[1602] (3) mutating the lysine residue at amino acid position 245 in the alpha-helix of IKZF3 to arginine or serine (i.e., by incorporating a K245R or K245S mutation, numbered according to SEQ ID NO: 19).

[1603] These variant IKZF3-based degradation tags were fused to the N-terminus of NanoLuciferase and cloned into the pNL1.1CMV vector, which has a CMV promoter. 5 ng (for all the tags that do not include residues 236-249 of SEQ ID NO: 19) or 50 ng (for all the tags that include residues 236-249 of SEQ ID NO: 19) of each construct was transfected into HEK293T cells. The transfected cells were treated with 100 μM, 10 μM, 1 μM, 0.1 μM, 0.01 μM, or 0.001 μM lenalidomide, or DMSO control for 2-4 hours at 37° C. Pre-treatment samples were treated with 10 μM MG132 for one-hour at 37° C. prior to treatment with 100 μM lenalidomide. Protein degradation was measured using western blot as described in Example 2.

[1604] Results from two studies are described below.

[1605] In a first study, IKZF3 136-180 and 236-249 (a tag comprising the amino acid sequence of SEQ ID NO: 3) facilitated lenalidomide-dependent degradation of NanoLuciferase (FIG. 3B). Mutating the lysine residue at position 245 (numbered according to SEQ ID NO: 19) to arginine (a tag comprising the amino acid sequence of SEQ ID NO: 84) or serine (a tag comprising the amino acid sequence of SEQ ID NO: 100) did not significantly impact the ability of the tag to mediate degradation (FIG. 3B). Similarly, IKZF3 136-180 MALEK (a tag comprising the amino acid sequence of SEQ ID NO: 85) and IKZF3 136-170 MALEK (a tag comprising the amino acid sequence of SEQ ID NO: 86), where residues 236-249 (numbered according to SEQ ID NO: 19) were replaced with helix MALEKMALEKMALE (SEQ ID NO: 91), also retained the ability to facilitate lenalidomide-dependent degradation (FIG. 3B). In contrast, IKZF3 140-170 MALEK (a tag comprising the amino acid sequence of SEQ ID NO: 87), IKZF3 141-163 MALEK (a tag comprising the amino acid sequence of SEQ ID NO: 88), and IKZF3 145-155 MALEK (a tag comprising the amino acid sequence of SEQ ID NO: 89) did not mediate lenalidomide-induced degradation (FIG. 3B), suggesting that at least the first four amino acids HKRS (SEQ ID NO: 40) (positions 136-139, numbered according to SEQ ID NO: 19) are required for degradation.

[1606] In a second study, cells expressing IKZF3 136-180-tagged NanoLuciferase or IKZF3 136-170 MALEK-tagged NanoLuciferase were treated with various doses of lenalidomide for 2 hours and analyzed using Western blot as described above. Both tags were able to mediate lenalidomide-dependent degradation (FIGS. 4A and 4B). The level of degradation increased as the concentrations of lenalidomide increased (FIGS. 4A and 4B). In addition, cells expressing IKZF3 136-180-tagged NanoLuciferase were treated with 10 μM of lenalidomide for increasing amounts of time before Western blot analysis. Degradation was evident as early as 1 hour and was close to complete by 4 hours (FIG. 4C).

### Example 4: Evaluation of IKZF3-Based Degradation Tags Joined to Transcription Factors

[1607] IKZF3-based degradation tags were evaluated for their ability to facilitate the degradation of melanogenesis associated transcription factor (MITF) or avian myelocytomatosis viral oncogene (MYC) homolog by Western blot. In addition to the IKZF3-based degradation tags, MITF and MYC were also fused to a FLAG tag to facilitate their detection using an anti-FLAG antibody.

[1608] In a first study, IKZF3 136-180 and 236-249-tagged MITF or IKZF3 136-180-tagged MITF was examined for their sensitivity to lenalidomide-dependent degradation. Cells were transfected using pNL1.1CMV constructs encoding the tagged MITF fusions and treated with various concentrations of lenalidomide for 4 hours or treated with 10 μM of lenalidomide for varying amounts of time before the cells were subjected to Western blot analysis. Some cells were treated with MG132 prior to treatment with 100 μM lenalidomide. DMSO was used as vehicle control. As shown in FIGS. 5A and 5B, IKZF3 136-180 and 236-249 was more effective than IKZF3 136-180 in mediating lenalidomide-dependent degradation of MITF. The level of degradation correlated with the concentration of lenalidomide (FIG. 5A) and the length of lenalidomide treatment (FIG. 5B), suggesting that the level of residual target protein levels could be fine-tuned by the dosing the lenalidomide.

[1609] In a second study, a lysine free IKZF3 136-180 and 236-249 (a variant of IKZF3 136-180 and 236-249 in which every lysine residue in the tag was mutated to arginine) (a tag comprising the amino acid sequence of SEQ ID NO: 4) was tested for its ability to mediate lenalidomide-dependent degradation. Without wishing to be bound by theory, if the lenalidomide-dependent degradation is mostly mediated via ubiquitination of the target protein (MITF in this example) rather than the IKZF-based tag itself, replacing all the lysine residues in the tag with arginine may not have a significant impact on the level of degradation. As shown in FIGS. 6A, 6B, 6C, and 6D, replacing all the lysine residues in the IKZF3 136-180 and 236-249 degradation tag did not significantly impact the ability of this tag to mediate lenalidomide-dependent degradation of MITF, suggesting that degradation of tagged MITF was mostly through ubiquitination of MITF, rather than the tag itself. Both lenalidomide and pomalidomide effectively facilitated degradation of tagged MITF (FIG. 6D).

[1610] In a third study, IKZF3 136-180 Q147H (a variant of IKZF3 136-180 in which the glutamine residue at position 147, numbered based on SEQ ID NO: 19, was replaced with histidine) (SEQ ID NO: 27) was tested. Glutamine at position 147 has been shown to be essential for IMiD-induced CRBN binding and degradation of IKZF1 or IKZF3 (Krönke et al., Science. 2014 Jan. 17; 343(6168):301-5, incorporated herein by reference in its entirety). As expected, the Q147H substitution blocked the ability of IKZF3 136-180 to mediate the lenalidomide-dependent degradation of MITF (FIG. 7).

[1611] In a fourth study, IKZF3 136-180 and 236-249 was examined for its ability to mediate lenalidomide-dependent degradation of another transcription factor avian myelocytomatosis viral oncogene (MYC) homolog. HEK293T cells transfected with a fusion molecule, in which IKZF3 136-180 and 236-249 was fused to the N-terminus of MYC, were treated with various concentrations of lenalidomide for 4 hours. The levels of tagged MYC, which was also fused to an FLAG tag, was assessed by Western blot using an anti-FLAG antibody. As shown in FIG. 8, IKZF3 136-180 and 236-249 also mediated the lenalidomide-dependent degradation of tagged MYC. The level of degradation correlated with the concentration of lenalidomide (FIG. 8).

### Example 5: Evaluation of IKZF3-Based Degradation Tags Joined to Transmembrane Proteins by Western Blot

[1612] The ability of IKZF3-based degradation tags to facilitate lenalidomide-dependent degradation of the single-pass membrane, cell surface proteins CD3zeta, CD8, CD8/CD3zeta, CD19, and CD22 was evaluated. The IKZF3 136-180 and 236-249 tag (a tag comprising the amino acid sequence of SEQ ID NO: 2) was fused to the C-terminus of the single-pass membrane proteins using the 16GS linker GGGGSGGGGTGGGGSG (SEQ ID NO: 28). Viruses were generated from IKZF3 136-180 and 236-249-tagged CD3zeta, CD8, CD8/CD3zeta, CD19, and CD22 maxi preps purchased from Genewiz. Stable Jurkat cell lines were transduced with the viruses and treated with 10 μM of lenalidomide for 4 hours prior to analysis by Western blot. All the tagged membrane proteins further comprise a V5 tag to facilitate their detection using an anti-V5 antibody.

[1613] As shown in FIGS. 9A, 9B, 9C, and 9D, all the constructs tested were sensitive to lenalidomide-dependent degradation, although the level of sensitivity varied among the constructs. Interestingly, there seems to be a correlation between the level of lenalidomide-dependent degradation and the number of cytosolic amino acids in the target protein (FIG. 9A), as target proteins with more amino acids in the cytosol were degraded to a greater extent.

[1614] Overall, these data suggest that IKZF3-based degradation tags may be able to mediate the degradation of CD proteins (and single-pass membrane proteins in general) in the presence of lenalidomide.

### Example 6: Evaluation of IKZF3-Based Degradation Tags Joined to Transmembrane Proteins by Flow Cytometry

[1615] The dose-responsive effect of lenalidomide treatment on target proteins fused to IKZF3-based degradation tags was evaluated by flow cytometry. In particular, flow cytometry analysis was conducted to determine whether there was a difference between the total amount of target protein degraded and the total amount of target protein expressed on the cell surface.

[1616] Jurkat cells expressing IKZF3 136-180 and 236-249-tagged CD19 were analyzed by flow cytometry at 0, 1, 6, 16, and 24 hours post treatment with 1 μM or 10 μM lenalidomide. CD19 was stained with anti-human CD19 antibody (BD Pharmingen 555413).

[1617] 90% of transduced Jurkat cells expressed CD19 on the surface, with no detectable CD19 expression on parental Jurkat cells (FIG. 10E). A reduction in mean fluorescence intensity (MFI) and percentage of CD19 expression was observed after cells were treated with lenalidomide for 16 hours or 24 hours, which can be blocked by MG132 treatment (FIGS. 10C, 10D, 10E, and 10F). This differs from what was seen in the western blot analysis described in Example 5, which shows major reduction in CD19 levels after a 6-hour, 10 μM lenalidomide treatment.

[1618] These data show that an IKZF3-based degradation tag can be used to selectively degrade single-pass transmembrane proteins.

### Example 7: Evaluation of Chimeric Antigen Receptors (CARs) Fused to HilD Tag and/or FurON by Western Blot

[1619] In this example, anti-CD19 chimeric antigen receptor CAR19 was modified with the HilD tag and/or a furin degron (FurON). FurON can serve as a switch when fused to a CAR molecule. FurON comprises two components: (1) a degron or degradation domain, which is a mutated protein domain unable to acquire a proper conformation in the absence of a small molecule ligand (e.g., bazedoxifene), and (2) a furin cleavage site (FIG. 11). Without wishing to be bound by theory, in the absence of the small molecule ligand (e.g., bazedoxifene), the misfolded/unfolded degradation domain can be degraded by intracellular degradation pathways along with the CAR molecule that is fused to the degradation domain (FIG. 11). In the presence of the small molecule ligand (e.g., bazedoxifene), the degradation domain assumes a proper conformation, leading to the exposure of the furin cleavage site and removal of the degradation domain (FIG. 11). In some embodiments, the FurON switch can be combined with the HilD switch (FIG. 12C). Combining these two switches could increase the speed of turning off CAR expression and activity in the presence of toxicities (FIG. 12C).

[1620] Polynucleotide sequences encoding HilD tagged CAR19 were cloned into pNGx_LV_v002 lenti-viral expression vector. gBlocks were ordered from IDT. Table 24 provides information on these gBlocks. Construct 765 comprises, from N-terminus to C-terminus, a signal peptide, FurOn, and CAR19. Construct 766 comprises, from N-terminus to C-terminus, a signal peptide, FurON, CAR19, a 16GS linker, the HilD tag, and a V5. Construct 767 comprises, from N-terminus to C-terminus, a signal peptide, FurON, CAR19, a 16GS linker, and the HilD tag. Construct 768 comprises, from N-terminus to C-terminus, a signal peptide, CAR19, a 16GS liker, the HilD tag, and a V5. Construct 769 comprises, from N-terminus to C-terminus, a signal peptide, CAR19, a 16GS linker, and the HilD tag. Construct 770 comprises, from N-terminus to C-terminus, a signal peptide, CAR19, a 16GS linker, and a lysine free HilD tag. In the lysine free HilD tag (shown as “HilD tag NoK” in Table 24), every lysine residue in the tag has been replaced by arginine. Construct 771 comprises, from N-terminus to C-terminus, a signal peptide, CAR19, the HilD tag, and a V5. Construct 6761 comprises, from N-terminus to C-terminus, a signal peptide, CAR19, a 16KGS linker, the HilD tag, and a V5. Construct 773 comprises, from N-terminus to C-terminus, a modified signal peptide, the HilD tag, a furin cleavage site, and CAR19. Construct 774 comprises, from N-terminus to C-terminus, a signal peptide, the HilD tag, a furin cleavage site, and CAR19. Briefly, gBlocks were digested, purified using the Qiagen MinElute PCR Purification Kit (cat #28004), and ligated into the pNGx-LV_v002 lenti-viral expression vector. The resultant clones were confirmed by sequencing.

TABLE 24
Components of gBlocks

| | | SEQ ID NO of amino acid sequence |
|---|---|---|
| Construct # | gBlocks | (signal peptide included) |
| 765 | FurON_CAR19 | SEQ ID NO: 92 |
| 766 | FurON_CAR19_16GS_HilD tag_V5 | SEQ ID NO: 93 |
| 767 | FurON_CAR19_16GS_HilD tag | SEQ ID NO: 32 |
| 768 | CAR19_16GS_HilD tag_V5 | SEQ ID NO: 94 |
| 769 | CAR19_16GS_HilD tag | SEQ ID NO: 30 |
| 770 | CAR19_16GS_HilD tag_NoK | SEQ ID NO: 31 |
| 771 | CAR19_HilD tag_V5 | SEQ ID NO: 95 |
| 6761 | CAR19_16KGS_HilD tag_V5 | SEQ ID NO: 96 |
| 773 | HilD tag_CAR19_modSigPep | SEQ ID NO: 97 |
| 774 | HilD tag_CAR19 | SEQ ID NO: 98 |

[1621] Viruses were prepared from maxi preps and used to transduce JNL cells. Either 275 μL of viral supernatant or 700 μL of viral supernatant was used for transduction. JNL cells are Jurkat cells engineered with a luciferase gene under control of the NFAT promoter. The transduced JNL cells were examined for CAR expression in the presence or absence of lenalidomide treatment using Western blot.

[1622] Briefly, cells were diluted to 0.5×10⁶ in 3 mL total in 6 well dishes. Each cell line was plated into two wells (one for DMSO, one for 10 μM lenalidomide treatment). Bazedoxifene was added at a final concentration of 1 μM to every well that contained a cell line expressing a fusion comprising FurON. For all cell lines, either 10 μM final lenalidomide or DMSO was added. Cells were incubated at 37° C. and 5% CO₂ overnight.

[1623] 24 hours after compound treatment, cells were pelleted, washed with PBS, and lysed with 50 μL RIPA buffer (Boston Bioproducts BP-115D) containing protease inhibitors (Roche 04693124001). Lysates were centrifuged, supernatant transferred to new tubes and protein quantities read by Lowry Assay (BioRad 5000111). Each sample was normalized to 30 μg total protein in a 20 μL volume with 4× sample buffer (Thermo Scientific NP0007) and 10× reducing agent (Thermo Scientific NP0009). Samples were subjected to Western blot analysis using a mouse anti-V5 antibody (Thermo Scientific MA5-15253) at 1:1000 dilution, a mouse anti-actin antibody (Sigma Aldrich A5441) at 1:10000 dilution, and/or a mouse anti-CD3z antibody (BD 551034) at 1:1000 dilution.

[1624] As expected, lenalidomide did not have any impact on FurON-CAR19 without the HilD tag (FIG. 13A). In the presence of the HilD tag, treatment with 10 μM lenalidomide almost completely degraded FurON-CAR19 regardless of the presence of the V5 tag (FIGS. 13B and 13C). 10 μM lenalidomide treatment also almost completely degraded all CAR19-HilD constructs regardless of the presence of the 16GS linker or the V5 tag (FIGS. 14A-14C). The lenalidomide-dependent degradation of construct 770 (FIG. 14D), which comprises a lysine free HilD tag (every lysine residue in the HilD tag was replaced with arginine), suggests that degradation of CAR19 was mostly mediated by ubiquitination of CAR19 itself, rather than the HilD tag.

[1625] Next, the kinetics of CAR19 degradation as well as the effective lenalidomide doses for reduction of CAR19 expression were examined by Western blot. JNL cells expressing construct 769 (CAR19_16GS_HilD tag) were diluted to 0.5×10⁶ in 3 mL total in 6 well dishes. Each cell line was plated into multiple wells for lenalidomide treatment/time-points. Once cells were plated, the samples were treated with various doses (10 μM, 1 μM, 0.1 μM, 0.01 μM, or 0.001 μM) of lenalidomide or DMSO for different amounts of time. Cells were harvested and subjected to Western blot as described above using a mouse anti-actin antibody (Sigma Aldrich A5441) at 1:10000 dilution or a mouse anti-CD3zeta antibody (BD 551034) at 1:1000 dilution.

[1626] 10 μM of lenalidomide degraded CAR19-16GS-HilD-tag fusion protein in a time-dependent manner (FIG. 15A). Degradation was evident as early as 4 hours and appeared to reach maximal degradation by 8 hours (FIG. 15A). The level of degradation was stable from 8-24 hours, with no apparent re-bound of protein expression (FIG. 15A).

[1627] As shown in FIG. 15B, lenalidomide degraded CAR19-16GS-HilD-tag fusion protein at concentrations as low as 100 nM. CAR19 degradation was evident with every dose of compound higher than 100 nM (FIG. 15B), indicating that there was no compound hook-effect. The titration of protein degradation seen at lower lenalidomide concentrations suggests that the degradation is tunable and precise CAR19 levels may be regulated by adjusting the dosing of lenalidomide.

### Example 8: Evaluation of Chimeric Antigen Receptors (CARs) Fused to HilD Tag and/or FurON by Flow Cytometry

[1628] Next, the surface expression of CAR19 on stably transduced JNL cells was examined by flow cytometry. On Day 1, the transduced JNL cells were plated with or without lenalidomide at 10 μM for 24 hours. The cells expressing FurON-CAR19 constructs were cultured with and without lenalidomide in the presence or absence of bazedoxifene. On Day 2, cells were harvested, stained using biotinylated-protein L (Genscript, M00097) followed by PE conjugated streptavidin (Jackson Lab, 016-110-084), and subjected to flow cytometry analysis using Fortessa instrument.

[1629] For the molecules in which the HilD tag was fused to the C-terminus of CAR19 (constructs 769, 771, 6761, 768, and 770), the transduced cells showed CAR expression on more than 60% of the cells (FIGS. 16A, 16B, 16C, 16D, and 16E). No CAR expression was detected on parental JNL cells (FIGS. 16A, 16B, 16C, 16D, and 16E). Treatment with 10 μM lenalidomide for 24 hours significantly reduced surface CAR expression (FIGS. 16A, 16B, 16C, 16D, and 16E). Notably, the lysine-free HilD tag also mediated lenalidomide-dependent reduction of surface CAR expression (FIG. 16E).

[1630] For the molecules in which the HilD tag was fused to a furin cleavage site and then to the N-terminus of CAR19 (constructs 773 and 774), the transduced cells showed CAR expression (FIGS. 16F and 16G). Incubating with 10 μM lenalidomide for 24 hours did not impact surface CAR expression (FIGS. 16F and 16G).

[1631] Furthermore, FurON-CAR19 constructs with or without the HilD tag were examined for their surface expression under the regulation of bazedoxifene and/or lenalidomide. As shown in FIGS. 17A, 17B, and 17C, surface CAR expression was only detected in the presence of bazedoxifene and lenalidomide-dependent reduction of surface CAR levels was only observed when CAR19 was fused to the HilD tag.

[1632] Table 25 provides a summary of the flow cytometry data shown in FIGS. 16A, 16B, 16C, 16D, 16E, 16F, 16G, 17A, 17B, and 17C.

TABLE 25
Summary of flow cytometry data

| | | | | | % reduction |
|---|---|---|---|---|---|
| Construct | | CAR | Effect of | Effect of | in CAR |
| # | Construct | Expression | bazedoxifene | lenalidomide | expression |
| 768 | CAR19_16GS_HilD tag_V5 | Yes | N/A | Yes | 88 |
| 769 | CAR19_16GS_HilD tag | Yes | N/A | Yes | 90 |
| 770 | CAR19_16GS_HilD tag_NoK | Yes | N/A | Yes | 83 |
| 771 | CAR19_HilD tag_V5 | Yes | N/A | Yes | 87 |
| 773 | HilD tag_CAR19_modSigPep | Yes | N/A | No | 4 |
| 774 | HilD tag_CAR19 | Yes | N/A | No | 5 |
| 6761 | CAR19_16KGS_HilD tag_V5 | Yes | N/A | Yes | 77 |
| 765 | FurON_CAR19 | Yes | Yes | No | N/A |
| 766 | FurON_CAR19_16GS_HilD | Yes | Yes | Yes | 92 |
| | tag_V5 | | | | |
| 767 | FurON_CAR19_16GS_HilD tag | Yes | Yes | Yes | 95 |

[1633] Next, surface CAR expression in the presence of a dose titration of lenalidomide was examined by flow cytometry. Briefly, JNL cells stably transduced with construct 769 (CAR19_16GS_HilD tag) or construct 770 (CAR19_16GS_HilD tag_NoK) were incubated with 8 different concentrations of lenalidomide (starting at 2 μM for a 4-hour treatment or 1 μM for a 20-hour treatment) to determine the dose response effect. The cells were then analyzed by flow cytometry as described above using biotinylated-protein L (Genscript, M00097) followed by PE conjugated streptavidin (Jackson Lab, 016-110-084).

[1634] The results for the 4-hour treatment groups are shown in FIGS. 18A and 18B and Table 26. The results for the 20-hour treatment groups are shown in FIGS. 18C, 18D, 18E, and 18F and Table 27. After a 4-hour lenalidomide treatment, a decrease in the MFI was detected with a slight reduction in % CAR expression (% of cells expressing CAR) (Table 26). After a 20-hour treatment, lenalidomide more prominently reduced % CAR expression and MFI in a dose-dependent manner (Table 27, FIGS. 18E and 18F). There was no significant difference between the results from construct 769 (CAR19_16GS_HilD tag) and the results from construct 770 (CAR19_16GS_HilD tag_NoK), suggesting that ubiquitination may mostly occur via the lysine residues in the target protein, rather than in the HilD tag itself.

TABLE 26
Effect of lenalidomide after 4 hours of treatment

| Lenalidomide | Construct 769 | | Construct 770 | |
|---|---|---|---|---|
| concentration (μM) | % CAR Expression | MFI | % CAR Expression | MFI |
| 2 | 59.5 | 2446 | 50.8 | 1576 |
| 0.633 | 60.5 | 2428 | 51.9 | 1577 |
| 0.2 | 61 | 2464 | 51.9 | 1700 |
| 0.063 | 64.6 | 2743 | 56.7 | 1945 |
| 0.02 | 66.1 | 3117 | 58 | 2124 |
| 0.006 | 67 | 3591 | 63.6 | 2763 |
| 0.002 | 67.1 | 4297 | 51.2 | 2255 |
| 0.001 | 68.8 | 4980 | 52 | 2224 |
| 0 | 66.8 | 5975 | 59.4 | 3398 |

TABLE 27
Effect of lenalidomide after 20 hours of treatment

| Lenalidomide | Construct 769 | | Construct 770 | |
|---|---|---|---|---|
| concentration (μM) | % CAR Expression | MFI | % CAR Expression | MFI |
| 1 | 3.42 | 414 | 3.44 | 429 |
| 0.3165 | 6.07 | 447 | 4.3 | 425 |
| 0.1001 | 7.79 | 533 | 5.21 | 425 |
| 0.0317 | 7.49 | 501 | 6.83 | 477 |
| 0.01 | 11.7 | 592 | 10.3 | 502 |
| 0.0032 | 23.8 | 873 | 21.2 | 885 |
| 0.001 | 41.7 | 1552 | 35.4 | 1246 |
| 0.0003 | 57.7 | 2542 | 46.8 | 1731 |
| 0 | 66.8 | 5975 | 59.4 | 3398 |

### Example 9: Evaluation of Chimeric Antigen Receptors (CARs) Fused to HilD Tag and/or FurON Using Functional Readout

[1635] In this example, a number of studies were conducted to determine if CAR19 and FurON-CAR19 were functional when tagged with HilD and whether degradation induced by lenalidomide was sufficient to abolish the function of CAR19 in Jurkat cells.

[1636] This study used the JNL cell line described above, which is a Jurkat cell line modified with an NFAT luciferase reporter. Co-culturing of CAR19-expressing JNL cells and CD19-expressing B cells activates the NFAT signaling, leading to luciferase expression.

[1637] In a first study, JNL cells expressing construct 767 (FurON_CAR19_16GS_HilD tag) or construct 769 (CAR19_16GS_HilD tag) were plated. JNL cells expressing construct 767 (FurON_CAR19_16GS_HilD tag) were incubated with 1 μM bazedoxifene. All the JNL cells were treated with 10 μM lenalidomide for 4 hours or 24 hours. Lenalidomide-treated JNL cells were incubated with Nalm6 cells, K562 cells, or CD19-expressing K562 cells for 4 hours, 8 hours, or 20 hours. Samples were treated with Brightglo (Promega E2620) following the manufacturer's protocol and luminescence was read in a Perkin Elmer Viewlux with a 5-second or 40-second exposure.

[1638] As expected, luminescence signals were only observed when JNL cells expressing construct 769 (CAR19_16GS_HilD tag) were co-cultured with CD19+ target cells (Nalm6 cells and CD19-expressing K562 cells) (FIG. 19A). Lenalidomide treatment reduced the luminescence signal to background levels in every instance with the exception of the 4-hour lenalidomide/4-hour target cell treatments (FIG. 19A). One possible explanation is that JNL cells expressing construct 769 (CAR19_16GS_HilD tag) had to be treated with lenalidomide for longer than 8 hours in order to reduce luminescence signal in this NFAT luciferase reporter assay. After subtracting background signals (signals from the media sample), lenalidomide treatment reduced the luminescence signal by ˜95% in CAR-expressing JNL cells co-cultured with CD19-expressing K562 cells and by ˜88% in CAR-expressing JNL cells co-cultured with Nalm6 cells. This data suggests that HilD-tag is sufficient to significantly reduce CAR19 function in the presence of lenalidomide.

[1639] Similarly, luminescence signals were only observed when JNL cells expressing construct 767 (FurON_CAR19_16GS_HilD tag) were co-cultured with CD19+ cells (Nalm6 cells and CD19-expressing K562 cells) in the presence of bazedoxifene (FIG. 20A). Lenalidomide treatment reduced the luminescence signal to background levels in the bazedoxifene co-treated samples (FIG. 20A). After subtracting background signals (signals from the media sample), lenalidomide treatment reduced the luminescence signal by ˜90% in CAR-expressing JNL cells co-cultured with CD19-expressing K562 cells and by ˜83% in CAR-expressing JNL cells co-cultured with Nalm6 cells (FIG. 20B). This data suggested that for a CAR19 construct modified by both FurON and the HilD tag, the function of the CAR19 can be increased by bazedoxifene treatment and then reduced by lenalidomide treatment.

[1640] A second study was conducted to determine the sensitivity of HilD-tagged CAR19 or FurON-CAR19 to lenalidomide-dependent degradation. JNL cells expressing construct 765 (FurON_CAR19), construct 767 (FurON_CAR19_16GS_HilD tag), construct 769 (CAR19_16GS_HilD tag), or construct 770 (CAR19_16GS_HilD tag_NoK) were plated. JNL cells expressing construct 765 (FurON_CAR19) or construct 767 (FurON_CAR19_16GS_HilD tag) were incubated with 1 μM bazedoxifene. There were three treatment groups: “20 hr pre-target cells” (a total of 44-hour lenalidomide treatment), “4 hr pre-target cells” (a total of 28-hour lenalidomide treatment), and “16 hr post-target cells” (a total of 8-hour lenalidomide treatment). For the “20 hr pre-target cells” group, MG132 (10 μM final concentration) was added to transduced JNL cells three hours after bazedoxifene was added, lenalidomide was added 1 hour after MG132 was added, and K562 cells or CD19-expressing K562 target cells were added 20 hours after lenalidomide was added. For the “4 hr pre-target cells” group, MG132 (10 μM final concentration) was added to transduced JNL cells 19 hours after bazedoxifene was added, lenalidomide was added 1 hour after MG132 was added, and K562 cells or CD19-expressing K562 target cells were added 4 hours after lenalidomide was added. For the “16 hr post-target cells” group, K562 cells or CD19-expressing K562 target cells were added to transduced JNL cells 24 hours after bazadoxifene was added, MG132 (10 μM final concentration) was added 15 hours after the target cells were added, and lenalidomide was added 1 hour after MG132 was added. For target cell co-culture, K562 cells or CD19-expressing K562 cells were added to each well containing JNL cells and cultured on a GNF Systems Ultra-high throughput screening system in a 37° C. and 5% CO₂ incubator. 24 hours after K562 cells or CD19-expressing K562 cells were added, samples were treated with Brightglo (Promega E2620) following the manufacturer's protocol and luminescence was read in a Perkin Elmer Viewlux with a 5-second exposure.

[1641] As expected, transduced JNL cells only responded to K562 cells expressing CD19, but not K562 cells (FIGS. 21A, 21B, 21C, and 21D). Without the HilD tag, lenalidomide treatment had no impact on reporter response (FIG. 21A). In the presence of bazedoxifene, JNL cells expressing construct 767 (FurON_CAR19_16GS_HilD tag) showed reporter activation after being co-cultured with CD19-expressing K562 cells and this reporter activation was inhibited by lenalidomide in a dose-dependent manner (FIG. 21B). The IC50s range from ˜5 μM-0.1 μM. The IC50s of lenalidomide shift to decreased potency over time, with the highest IC50 at 8-hour treatment (“16 hr post-target cells” in FIG. 21B) and the lowest IC50 at 44-hour treatment (“20 hr pre-target cells” in FIG. 21B). The highest doses of lenalidomide decreased the luminescence signal by 100% in the 44-hour treatment group (“20 hr pre-target cells” in FIG. 21B) and the 28-hour treatment group (“4 hr pre-b-cell” in FIG. 21B), and by 90% in the 8-hour treatment group (“16 hr post-target cells” in FIG. 21B). Lenalidomide also inhibited the NFAT-luciferase reporter activation in JNL cells expressing construct 769 (CAR19_16GS_HilD tag) in a dose-dependent manner (FIG. 21C). The IC50s range from 1 μM to 0.05 μM, with the IC50s decreasing with increased lenalidomide treatment time. The highest 2-3 doses of lenalidomide (10 μM, 3.16 μM, and 1 μM) reduced the luminescence signal by almost 100% (FIG. 21C). Similarly, lenalidomide dose-dependently inhibited reporter activation in JNL cells expressing construct 770 (CAR19_16GS_HilD tag_NoK) (FIG. 21D). The IC50s range from 1 μM to 0.05 μM, with the IC50s decreasing with increased lenalidomide treatment time. The highest 2-3 doses of lenalidomide (10 μM, 3.16 μM, and 1 μM) reduced the signal almost by 100% (FIG. 21D). This response seen for CAR19 fused to the lysine-free HilD tag was similar to the response observed for CAR19 fused to the wild-type HilD tag, suggesting that the degradation of CAR19 is mostly due to ubiquitination of lysine residues on CAR19, rather than lysine residues on the HilD tag.

[1642] 28-hour 10 μM lenalidomide treatment caused reduction in CAR19 expression in all cell lines expressing a HilD-tagged CAR molecule and this reduction can be partially rescued by the proteasome inhibitor MG132 (data not shown). JNL cells expressing different constructs could not be compared directly as they had different levels of CAR expression, resulting in different levels of responses to CD19+ cells. Instead, comparisons were made between treatments in the same cell lines (FIGS. 22A, 22B, 22C, and 22D). For constructs comprising FurON, bazedoxifene treatment was necessary to activate the NFAT-luciferase reporter in the presence of CD19+ cells (FIGS. 22A and 22B). In the absence of the HilD tag, lenalidomide treatment did not impact the luminescence signal and MG132 might increase the signal (FIG. 22A). In the presence of the HilD tag, lenalidomide treatment reduced CD19-induced reporter activation almost to background levels (˜80%), and this reduction could be mostly rescued by the proteasome inhibitor MG132 (FIG. 22B). Constructs that do not comprise FurON did not require bazedoxifene for reporter activation (FIGS. 22C and 22D). JNL cells expressing HilD-tagged CAR19 or lysine-free-HilD-tagged CAR19 shared similar responses to lenalidomide: the CD19-induced NFAT reporter signal was significantly reduced by lenalidomide and this reduction could be partially rescued by MG132 (FIGS. 22C and 22D).

### Example 10: Evaluation of HilD-Tamed Tau Proteins

### Methods

### Constructs

[1643] Constructs were generated by synthesis of gene blocks (IDT) and introduction into in-house plasmids via Gibson assembly. Table 28 lists the sequences of the constructs used in this example.

TABLE 28
Sequences of the Tau constructs.

| SEQ ID | | |
|---|---|---|
| NO | Comment | Sequence |
| SEQ ID | Tau 0N4R | [sequence omitted] |
| NO: 35 | | KAEEAGIGDTPSLEDEAAGHVTQARMVSKSKDGTGSDDKKAKGAD |
| | | GKTKIATPRGAAPPGQKGQANATRIPAKTPPAPKTPPSSGEPPKSGD |
| | | RSGYSSPGSPGTPGSRSRTPSLPTPPTREPKKVAVVRTPPKSPSSAKS |
| | | RLQTAPVPMPDLKNVKSKIGSTENLKHQPGGGKVQIINKKLDLSNV |
| | | QSKCGSKDNIKHVPGGGSVQIVYKPVDLSKVTSKCGSLGNIHHKPG |
| | | GGQVEVKSEKLDFKDRVQSKIGSLDNITHVPGGGNKKIETHKLTFR |
| | | ENAKAKTDHGAEIVYKSPVVSGDTSPRHLSNVSSTGSIDMVDSPQL |
| | | ATLADEVSASLAKQGL |
| SEQ ID | Tau 0N4R | [sequence omitted] |
| NO: 36 | P301S | KAEEAGIGDTPSLEDEAAGHVTQARMVSKSKDGTGSDDKKAKGAD |
| | | GKTKIATPRGAAPPGQKGQANATRIPAKTPPAPKTPPSSGEPPKSGD |
| | | RSGYSSPGSPGTPGSRSRTPSLPTPPTREPKKVAVVRTPPKSPSSAKS |
| | | RLQTAPVPMPDLKNVKSKIGSTENLKHQPGGGKVQIINKKLDLSNV |
| | | QSKCGSKDNIKHVSGGGSVQIVYKPVDLSKVTSKCGSLGNIHHKPG |
| | | GGQVEVKSEKLDFKDRVQSKIGSLDNITHVPGGGNKKIETHKLTFR |
| | | ENAKAKTDHGAEIVYKSPVVSGDTSPRHLSNVSSTGSIDMVDSPQL |
| | | ATLADEVSASLAKQGL |
| SEQ ID | HilD- | MHKRSHTGERPFQCNQCGASFTQKGNLLRHIKLHTGEKPFKCHLCN |
| NO: 101 | 16xGS- | TASAEARHIKAEMGGGGGSGGGGTGGGGSGMAEPRQEFEVMEDH |
| | Tau 0N4R | AGTYGLGDRKDQGGYTMHQDQEGDTDAGLKAEEAGIGDTPSLED |
| | | EAAGHVTQARMVSKSKDGTGSDDKKAKGADGKTKIATPRGAAPP |
| | | GQKGQANATRIPAKTPPAPKTPPSSGEPPKSGDRSGYSSPGSPGTPGS |
| | | RSRTPSLPTPPTREPKKVAVVRTPPKSPSSAKSRLQTAPVPMPDLKN |
| | | VKSKIGSTENLKHQPGGGKVQIINKKLDLSNVQSKCGSKDNIKHVP |
| | | GGGSVQIVYKPVDLSKVTSKCGSLGNIHHKPGGGQVEVKSEKLDFK |
| | | DRVQSKIGSLDNITHVPGGGNKKIETHKLTFRENAKAKTDHGAEIV |
| | | YKSPVVSGDTSPRHLSNVSSTGSIDMVDSPQLATLADEVSASLAKQ |
| | | GL |
| SEQ ID | HilD- | MHKRSHTGERPFQCNQCGASFTQKGNLLRHIKLHTGEKPFKCHLCN |
| NO: 102 | 16xGS- | TASAEARHIKAEMGGGGGSGGGGTGGGGSGMAEPRQEFEVMEDH |
| | Tau 0N4R | AGTYGLGDRKDQGGYTMHQDQEGDTDAGLKAEEAGIGDTPSLED |
| | (P301S)- | EAAGHVTQARMVSKSKDGTGSDDKKAKGADGKTKIATPRGAAPP |
| | XTEN | GQKGQANATRIPAKTPPAPKTPPSSGEPPKSGDRSGYSSPGSPGTPGS |
| | linker- | RSRTPSLPTPPTREPKKVAVVRTPPKSPSSAKSRLQTAPVPMPDLKN |
| | YFP | VKSKIGSTENLKHQPGGGKVQIINKKLDLSNVQSKCGSKDNIKHVS |
| | | GGGSVQIVYKPVDLSKVTSKCGSLGNIHHKPGGGQVEVKSEKLDFK |
| | | DRVQSKIGSLDNITHVPGGGNKKIETHKLTFRENAKAKTDHGAEIV |
| | | YKSPVVSGDTSPRHLSNVSSTGSIDMVDSPQLATLADEVSASLAKQ |
| | | GLGSSGSETPGTSESATPESVSKGEELFTGVVPILVELDGDVNGHKF |
| | | SVSGEGEGDATYGKLTLKFICTTGKLPVPWPTLVTTFGYGLQCFAR |
| | | YPDHMKQHDFFKSAMPEGYVQERTIFFKDDGNYKTRAEVKFEGDT |
| | | LVNRIELKGIDFKEDGNILGHKLEYNYNSHNVYIMADKQKNGIKVN |
| | | FKIRHNIEDGSVQLADHYQQNTPIGDGPVLLPDNHYLSYQSALSKDP |
| | | NEKRDHMVLLEFVTAAGITLGMDELYK |
| SEQ ID | HilD- | MHKRSHTGERPFQCNQCGASFTQKGNLLRHIKLHTGEKPFKCHLCN |
| NO: 103 | 16xGS- | TASAEARHIKAEMGGGGGSGGGGTGGGGSGMAEPRQEFEVMEDH |
| | Tau 0N4R- | AGTYGLGDRKDQGGYTMHQDQEGDTDAGLKAEEAGIGDTPSLED |
| | 16xGS | EAAGHVTQARMVSKSKDGTGSDDKKAKGADGKTKIATPRGAAPP |
| | linker- | GQKGQANATRIPAKTPPAPKTPPSSGEPPKSGDRSGYSSPGSPGTPGS |
| | Biotin | RSRTPSLPTPPTREPKKVAVVRTPPKSPSSAKSRLQTAPVPMPDLKN |
| | ligase | VKSKIGSTENLKHQPGGGKVQIINKKLDLSNVQSKCGSKDNIKHVP |
| | | GGGSVQIVYKPVDLSKVTSKCGSLGNIHHKPGGGQVEVKSEKLDFK |
| | | DRVQSKIGSLDNITHVPGGGNKKIETHKLTFRENAKAKTDHGAEIV |
| | | YKSPVVSGDTSPRHLSNVSSTGSIDMVDSPQLATLADEVSASLAKQ |
| | | GLGGGGSGGGGTGGGGSGMDFKNLIWLKEVDSTQERLKEWNVSY |
| | | GTALVADRQTKGRGGLGRKWLSQEGGLYFSFLLNPKEFENLLQLPL |
| | | VLGLSVSEALEEITEIPFSLKWPNDVYFQEKKVSGVLCELSKDKLIV |
| | | GIGINVNQREIPEEIKDRATTLYEITGKDWDRKEVLLKVLKRISENLK |
| | | KFKEKSFKEFKGKIESKMLYLGEEVKLLGEGKITGKLVGLSEKGGA |
| | | LILTEEGIKEILSGEFSLRRS |
| SEQ ID | HilD- | MHKRSHTGERPFQCNQCGASFTQKGNLLRHIKLHTGEKPFKCHLCN |
| NO: 104 | 16xGS- | TASAEARHIKAEMGGGGGSGGGGTGGGGSGMAEPRQEFEVMEDH |
| | Tau 0N4R- | AGTYGLGDRKDQGGYTMHQDQEGDTDAGLKAEEAGIGDTPSLED |
| | 16xGS-V5 | EAAGHVTQARMVSKSKDGTGSDDKKAKGADGKTKIATPRGAAPP |
| | linker- | GQKGQANATRIPAKTPPAPKTPPSSGEPPKSGDRSGYSSPGSPGTPGS |
| | Biotin | RSRTPSLPTPPTREPKKVAVVRTPPKSPSSAKSRLQTAPVPMPDLKN |
| | ligase | VKSKIGSTENLKHQPGGGKVQIINKKLDLSNVQSKCGSKDNIKHVP |
| | | GGGSVQIVYKPVDLSKVTSKCGSLGNIHHKPGGGQVEVKSEKLDFK |
| | | DRVQSKIGSLDNITHVPGGGNKKIETHKLTFRENAKAKTDHGAEIV |
| | | YKSPVVSGDTSPRHLSNVSSTGSIDMVDSPQLATLADEVSASLAKQ |
| | | GLGGGGSGGGGTGGGGSGGKPIPNPLLGLDSTGSGMDFKNLIWLKE |
| | | VDSTQERLKEWNVSYGTALVADRQTKGRGGLGRKWLSQEGGLYF |
| | | SFLLNPKEFENLLQLPLVLGLSVSEALEEITEIPFSLKWPNDVYFQEK |
| | | KVSGVLCELSKDKLIVGIGINVNQREIPEEIKDRATTLYEITGKDWDR |
| | | KEVLLKVLKRISENLKKFKEKSFKEFKGKIESKMLYLGEEVKLLGEG |
| | | KITGKLVGLSEKGGALILTEEGIKEILSGEFSLRRS |
| SEQ ID | HilD- | MHKRSHTGERPFQCNQCGASFTQKGNLLRHIKLHTGEKPFKCHLCN |
| NO: 105 | 16xGS- | TASAEARHIKAEMGGGGGSGGGGTGGGGSGMAEPRQEFEVMEDH |
| | Tau 0N4R- | AGTYGLGDRKDQGGYTMHQDQEGDTDAGLKAEEAGIGDTPSLED |
| | 33xGS- | EAAGHVTQARMVSKSKDGTGSDDKKAKGADGKTKIATPRGAAPP |
| | linker- | GQKGQANATRIPAKTPPAPKTPPSSGEPPKSGDRSGYSSPGSPGTPGS |
| | Biotin | RSRTPSLPTPPTREPKKVAVVRTPPKSPSSAKSRLQTAPVPMPDLKN |
| | ligase | VKSKIGSTENLKHQPGGGKVQIINKKLDLSNVQSKCGSKDNIKHVP |
| | | GGGSVQIVYKPVDLSKVTSKCGSLGNIHHKPGGGQVEVKSEKLDFK |
| | | DRVQSKIGSLDNITHVPGGGNKKIETHKLTFRENAKAKTDHGAEIV |
| | | YKSPVVSGDTSPRHLSNVSSTGSIDMVDSPQLATLADEVSASLAKQ |
| | | GLGGGGSGGGGTGGGGGSGGGGTGGGGGSGGGGTGMDFKNLIWL |
| | | KEVDSTQERLKEWNVSYGTALVADRQTKGRGGLGRKWLSQEGGL |
| | | YFSFLLNPKEFENLLQLPLVLGLSVSEALEEITEIPFSLKWPNDVYFQ |
| | | EKKVSGVLCELSKDKLIVGIGINVNQREIPEEIKDRATTLYEITGKDW |
| | | DRKEVLLKVLKRISENLKKFKEKSFKEFKGKIESKMLYLGEEVKLL |
| | | GEGKITGKLVGLSEKGGALILTEEGIKEILSGEFSLRRS |
| SEQ ID | HilD- | MHKRSHTGERPFQCNQCGASFTQKGNLLRHIKLHTGEKPFKCHLCN |
| NO: 106 | 16xGS- | TASAEARHIKAEMGGGGGSGGGGTGGGGSGMAEPRQEFEVMEDH |
| | Tau 0N4R- | AGTYGLGDRKDQGGYTMHQDQEGDTDAGLKAEEAGIGDTPSLED |
| | XTEN | EAAGHVTQARMVSKSKDGTGSDDKKAKGADGKTKIATPRGAAPP |
| | linker- | GQKGQANATRIPAKTPPAPKTPPSSGEPPKSGDRSGYSSPGSPGTPGS |
| | Biotin | RSRTPSLPTPPTREPKKVAVVRTPPKSPSSAKSRLQTAPVPMPDLKN |
| | ligase | VKSKIGSTENLKHQPGGGKVQIINKKLDLSNVQSKCGSKDNIKHVP |
| | | GGGSVQIVYKPVDLSKVTSKCGSLGNIHHKPGGGQVEVKSEKLDFK |
| | | DRVQSKIGSLDNITHVPGGGNKKIETHKLTFRENAKAKTDHGAEIV |
| | | YKSPVVSGDTSPRHLSNVSSTGSIDMVDSPQLATLADEVSASLAKQ |
| | | GLSGSETPGTSESATPESMDFKNLIWLKEVDSTQERLKEWNVSYGT |
| | | ALVADRQTKGRGGLGRKWLSQEGGLYFSFLLNPKEFENLLQLPLVL |
| | | GLSVSEALEEITEIPFSLKWPNDVYFQEKKVSGVLCELSKDKLIVGIG |
| | | INVNQREIPEEIKDRATTLYEITGKDWDRKEVLLKVLKRISENLKKF |
| | | KEKSFKEFKGKIESKMLYLGEEVKLLGEGKITGKLVGLSEKGGALIL |
| | | TEEGIKEILSGEFSLRRS |
| SEQ ID | Tau 0N4R- | [sequence omitted] |
| NO: 107 | 16xG5- | KAEEAGIGDTPSLEDEAAGHVTQARMVSKSKDGTGSDDKKAKGAD |
| | Biotin | GKTKIATPRGAAPPGQKGQANATRIPAKTPPAPKTPPSSGEPPKSGD |
| | ligase | RSGYSSPGSPGTPGSRSRTPSLPTPPTREPKKVAVVRTPPKSPSSAKS |
| | | RLQTAPVPMPDLKNVKSKIGSTENLKHQPGGGKVQIINKKLDLSNV |
| | | QSKCGSKDNIKHVPGGGSVQIVYKPVDLSKVTSKCGSLGNIHHKPG |
| | | GGQVEVKSEKLDFKDRVQSKIGSLDNITHVPGGGNKKIETHKLTFR |
| | | ENAKAKTDHGAEIVYKSPVVSGDTSPRHLSNVSSTGSIDMVDSPQL |
| | | ATLADEVSASLAKQGLGGGGSGGGGTGGGGSGMDFKNLIWLKEV |
| | | DSTQERLKEWNVSYGTALVADRQTKGRGGLGRKWLSQEGGLYFSF |
| | | LLNPKEFENLLQLPLVLGLSVSEALEEITEIPFSLKWPNDVYFQEKKV |
| | | SGVLCELSKDKLIVGIGINVNQREIPEEIKDRATTLYEITGKDWDRKE |
| | | VLLKVLKRISENLKKFKEKSFKEFKGKIESKMLYLGEEVKLLGEGKI |
| | | TGKLVGLSEKGGALILTEEGIKEILSGEFSLRRS |
| SEQ ID | Tau 0N4R- | [sequence omitted] |
| NO: 108 | 16xG5- | KAEEAGIGDTPSLEDEAAGHVTQARMVSKSKDGTGSDDKKAKGAD |
| | V5-Biotin | GKTKIATPRGAAPPGQKGQANATRIPAKTPPAPKTPPSSGEPPKSGD |
| | ligase | RSGYSSPGSPGTPGSRSRTPSLPTPPTREPKKVAVVRTPPKSPSSAKS |
| | | RLQTAPVPMPDLKNVKSKIGSTENLKHQPGGGKVQIINKKLDLSNV |
| | | QSKCGSKDNIKHVPGGGSVQIVYKPVDLSKVTSKCGSLGNIHHKPG |
| | | GGQVEVKSEKLDFKDRVQSKIGSLDNITHVPGGGNKKIETHKLTFR |
| | | ENAKAKTDHGAEIVYKSPVVSGDTSPRHLSNVSSTGSIDMVDSPQL |
| | | ATLADEVSASLAKQGLGGGGSGGGGTGGGGSGGKPIPNPLLGLDST |
| | | GSGMDFKNLIWLKEVDSTQERLKEWNVSYGTALVADRQTKGRGG |
| | | LGRKWLSQEGGLYFSFLLNPKEFENLLQLPLVLGLSVSEALEEITEIP |
| | | FSLKWPNDVYFQEKKVSGVLCELSKDKLIVGIGINVNQREIPEEIKD |
| | | RATTLYEITGKDWDRKEVLLKVLKRISENLKKFKEKSFKEFKGKIES |
| | | KMLYLGEEVKLLGEGKITGKLVGLSEKGGALILTEEGIKEILSGEFSL |
| | | RRS |

### Biotin Ligase Transfection and Biotin Immunoprecipitation

[1644] HEK293T cells grown in 6-well tissue culture dishes were transfected with 3 micrograms of FLAG tagged CRBN and 2.1 micrograms of indicated Tan fusion construct using 6 μL of lipofectamine 2000, in a final volume of 200 μL of Optimem media. 48 hours after transfection, cells were treated with 50 μM biotin (diluted from 100 mM stock prepared in DMSO) and either DMSO (1 to 10,000) or 1 micromolar lenalidomide. Cells were incubated for 21 hours, then lysed after a wash in ice-cold PBS with 300 μL ice cold M-PER buffer (Thermo Fisher #78501) containing 1× Halt protease inhibitors (Thermo Fisher #1861281). Cell lysate was cleared and protein quantified by the BCA reaction, and protein concentration normalized in M-PER buffer. 20% of cell lysate (60 μL) was diluted 4-fold in an IP-lysis buffer (15 mM Tris pH7.5, 120 mM NaCl, 25 mM KCl, 2 mM EGTA, 2 mlv EDTA, 0.5% Triton X-100, 1× Halt protease inhibitor) and incubated with 50 μL Streptavidin M-280 magnetic Dynabeads (Thermo Fisher Cat #11205D) for 30 minutes at room temperature. Beads were subsequently washed three times with IP lysis buffer, then finally dissolved in 20 μL M-PER buffer containing protease inhibitors. 4× NuPage LDS buffer was added to a final concentration of 1× in this immunoprecipitated material and cell lysates were similarly diluted. 10× NuPage reducing buffer was then added to a concentration of 1×, and samples were heated to 95° C. for 5 minutes. Cell lysate or immunoprecipitated material were run on a 10% Bis-Tris Criterion XT gel (BioRad 3450111), blotted (TurboBlot), and incubated with primary antibodies as indicated. LiCor RDye 800CW Goat anti-rabbit (#925-32211) or 680 RD (#925-68070) secondary antibodies were incubated and signal measured on an Li-Cor Odyssey CLx imaging station.

### Image Analysis of HilD-Tau-YFP Fusions in HEK293T Cells

[1645] One day prior to transfection, wild-type HEK 293T or CRBN knockout (KO) HEK293T cells were seeded at 22.5K cells per well in 96-well plates. Cells were then transfected with 0.02 micrograms of HilD-Tau (P301S) fusion construct. One day after transfection wells were treated with varying concentrations of lenalidomide. After an overnight treatment cells were fixed in a final solution of 4% PFA and 4% Sucrose for 15 minutes. Fixed cells were washed with PBS. Cells were then incubated with 1:5000 Hoechst and 1:10000 Cellmask HCS for fifteen minutes, washed, then imaged.

[1646] Plates were imaged on the Incell Analyzer 6000 using a 20× objective capture and DAPI, FITC, and Cy5 channels. Image data was then quantified using cellprofiler where the cell nucleus was segmented via Hoechst staining and then the cell body identified by expanding the nuclear object to the edges of the segmented cell, identified by Cell mask staining. This cellular object was then used to measure the FITC intensity, corresponding to HilD-Tau (P301S)-YFP.

[1647] HEK293T Transfection and Quantification of HilD-Tau Degradation by Western Analysis

[1648] One day prior to transfection, HEK293T cells were plated at a density of 150,000 per well in a 24 well plate. The cells were then transfected with 0.175 micrograms of HilD-Tau (wild type). Four hours or 24 hours after transfection, wells were treated with a dose response of Lenalidomide. Cells were incubated overnight. The cells were then washed with ice cold PBS and lysed in 85 μL of N-PER buffer (Thermo Fisher #87792) supplemented with Halt protease and phosphatase inhibitors. Plates were incubated on ice with occasional shaking for 15 minutes. Lysate was then cleared by centrifugation at 15000 g, 4° C. for 15 minutes. LDS buffer and reducing agent were added to the cleared lysate and then samples were heated at 95° C. for 8 minutes. Samples were run on a 10% bis-tris gel at 150V for 70 minutes. Blots were transferred using the Biorad turboblot (Mixed molecular weight setting). Blots were probed with DAKO Tau (total tau) (Dako #A0024), actin (Cell signaling technologies #3700S), and AT8 (phospho-Tau) (Thermo Fisher #MN1020). The blots were developed with Supersignal west femto chemiluminescent substrate (Thermo Fisher #34095).

[1649] Quantification of Western bands was according to Molecular Psychiatry (2017) 22, 417-429.

### Rat Neuron Dissection and Nucleofection

[1650] Rat cortices were isolated from embryonic day 18.5 rats. Single cell suspensions were prepared by 15 minutes 37° C. digestion in papain (Brainbits #PAP) diluted in 3 mL of Hibernate E (—Ca) solution (Brainbits #HECA); next supplemented with DNAse (to a concentration of 0.5 mg/mL); triturated; incubated 10 minutes at 37° C.; triturated; and finally filtered through a 40 μm cell strainer. Approximately 8 million cells were nucleofected using P3 solution (Lonza nucleofection kit #V4XP-1024) with 2 micrograms of indicated plasmids. Program CU-133 on the 4D nucleofector was used. Cells were then diluted in neurobasal media (Life Technologies #21103) containing 1% serum, and plated at a density of 80,000 cells per well of a 96-well Biocoat (Corning #356640) plate. Note that substantial cell death occurred after nucleofection, necessitating the high initial plating density. On the subsequent day, the media was completely exchanged for media lacking serum.

[1651] Media was 50% exchanged every 7 days. On day 9, compounds were added to media at indicated final concentrations. Imaging of YFP signal was conducted at indicated intervals using InCell 6000 system (General Electric), coupled to a Liconic Instruments IC incubator (Cat 391180700)/plate hotel via a Thermo Scientific Orbitor RS robot.

### Human Neuron Nucleofection

[1652] Human pluripotent stem cells (hPSCs) were maintained in E8 media (Stem Cell Technologies) on vitronectin coated tissue culture plates. Confluent monolayers of hPSCs were neurally converted by changing the media to Ph I (see below for media recipes). Seven days post induction, cells were dissociated to single-cell suspension with Accutase, seeded at 1.5 million cells per milliliter in spinner flasks with Ph II/III media supplemented with 2 micromolar Thiazovivin and 10 ng/mL FGF2 (final) and incubated at 37° C. on a micro-stir plate at 40 rpm for 4 days. Media was then changed to Ph II/III and neurospheres were further cultured for 17 days at 60 rpm, changing media 50% twice a week. On day 28 media was changed to Ph IV and cultures were maintained 21 more days with 50% media change twice a week. From day 49 onwards cultures were switched to Ph V media for maintenance and dissociated with Papain kit (Worthington Sciences) for neuronal platedowns on laminin, fibronectin, and matrigel coated plates. Single cell suspension was nucleofected (10 million cells per reaction), 2 micrograms of construct. 80,000 cells were plated per well of 96-well plates. Neurons were incubated in Phase 5 media+blasticidin. Media was changed (50%) twice a week.

[1653] Phase I media: Base: Advanced DMEM/F12; Glutamax (1×) (Life Technologies #35050); Pen/Strep (1×) (Life Technologies #15140); N-acetyl-cysteine (500 micromolar); Heparin (2 micrograms/mL); SB431542 (10 micromolar); LDN193189 (100 nM); XAV939 (2 micromolar); N2 supplement (0.5% v/v).

[1654] Phase II/III media: Base: Advanced DMEM/F12; Glutamax (1×); Pen/Strep (1×); N-acetyl-cysteine (500 micromolar); Heparin (2 micrograms/ml); N2 supplement (0.5% v/v); B27 Supplement (1% v/v) (Lilfe Technologies #17504); FGF2 (10 ng/mL, first 4 days; 2.5 ng/mL, rest of Phase II/III); LDN193189 (100 nM); CHIR99021 (20 nM); Retinoic acid (5 nM).

[1655] Phase IV media: Base: Advanced DMEM/F12; GlutaMax (1×); Pen/Strep (1×); Heparin (2 micrograms/mL); N2 Supplement (0.5% v/v); B27 Supplement (0.4% v/v); Forskolin (10 micromolar); Calcium chloride (600 micromolar)

[1656] Phase V media: Base: Advanced DMEM/F12; GlutaMax (1×); Pen/Strep (1×); Heparin (2 micrograms/mL); N2 Supplement (0.5% v/v); B27 Supplement (1% v/v); Forskolin (10 micromolar); Calcium chloride (600 micromolar); BDNF (5 ng/mL); GDNF (5 ng/mL).

### Generation of Insoluble Tau Fractions

[1657] Sarkosyl insoluble fractionation was performed on 6 month old 58/4 (tg/tg) transgenic mice, an in-house tau transgenic mouse model overexpressing the full-length human 0N4R isoform of tau with the P301S mutation. Briefly, brain tissue isolated from mice was homogenized in 9:1 (v/w) of high-salt buffer (10 mM Tris-HCL, pH7.4, 0.8Nacl, 1 mM EDTA, and 2 mM dithiothreitol) with protease and phosphatase inhibitor and 0.1% sarkosyl. Homogenate was centrifuged at 10,000 g for 10 minutes at 4° C., and supernatant was collected. Pellet was re-extracted two times using same buffer conditions, and all supernatants were pooled. Additional sarkosyl was added to the supernatant to reach a 1% final sarkosyl concentration. After 1 hour nutation at room temperature, sample was centrifuged at 280,000 g for 1 hour at 4° C. Finally, the resulting pellet was re-suspended in PBS (300 ul/g of tissue) and briefly sonicated (20% power for 10, 10-second cycles) using hand-held probe (QSonica). This final fraction was stored at −80° C. until use and was referred to as the sarkosyl insoluble tau fraction.

### Results

[1658] HilD-Tau fusions, including aggregation prone Tau mutations, were generated to build tools to monitor the degradation of the aggregation-prone, toxic forms of Tau protein (FIG. 23).

[1659] In a first experiment, it was tested whether fusion of the HilD tag to Tau could induce the recruitment of the E3 ligase Cereblon (CRBN) via treatment with the immunomodulatory drug lenalidomide. A HilD-Tau-biotin ligase fusion was generated (FIG. 24A). Biotin ligase, upon exposure to biotin, generates reactive biotin species that covalently binds to proximate proteins within a radius of tens of nanometers. Upon treatment with Lenalidomide, but not in control conditions, HilD-Tau-biotin ligase caused robust biotionylation of a FLAG-tagged CRBN construct co-transfected with HilD-Tau-biotin ligase constructs in HEK293T cells (FIG. 24B). This confirms that the HUD tag can recruit CRBN to Tau via lenalidomide ternary complex formation.

[1660] Next, it was examined whether Tau could be degraded by CRBN recruitment in heterologous cells. HEK293T cells were transfected with a toxic, aggregation-prone form of Tau, 0N4R Tau P301S, fused with an N-terminal HilD tag and a C-terminal YFP (yellow fluorescent protein) reporter. Expression of this construct leads to toxicity over time in cells. Treatment with lenalidomide reduced YFP expression (FIGS. 25A and 25B) and improved viability of the HEK cells (FIG. 25C). This indicates that the HilD-Tau fusion can be used to reveal cytoprotective action of degradation of toxic Tau proteins, as found in neurodegenerative diseases.

[1661] Furthermore, it was tested whether Tau lacking an YFP tag would be degraded in HEK293T cells. Lenalidomide treatment reduced Tau levels, as quantified by Western analysis versus Actin loading control (FIG. 26A). Interestingly, decreasing the amount of Tau expression by lowering the amount of DNA transfected increased the efficiency of degradation, particularly of a phosphorylated form of Tau (FIG. 26A, bottom panels). This suggests that the system may be used to explore the capacity of the E3 ligase and proteasome system to degrade different levels of the Tau protein, and additionally that this system may be used to explore selective vulnerability of specific forms of a toxic protein to inducible degradation. The enhanced reduction of phosphorylated Tau suggests either that a specific subtype of Tau is more susceptible to degradation or that a fragment of Tau containing this epitope is more greatly degraded than other isoforms of Tau.

[1662] In a series of control experiments to further verify that the degradation of Tau was mediated via CRBN E3 ligase recruitment, the degradation of HilD-Tau or HilD-Tau (P301S)-YFP was tested in HEK293T cells lacking CRBN, and it was confirmed that no degradation occurred (FIGS. 26B and 26C). Further, degradation was sensitive to the Neddylation inhibitor MLN4924 (FIG. 26D). Neddylation is essential for the activity of the E3 ligase CRBN, indicating that the ubiquitinating activity of CRBN is needed for Tau targeted degradation.

[1663] Next, it was explored whether Tau could be degraded in neurons, which are the disease relevant cell type for Tau-mediated neurodegenerative diseases, and whether this process of degradation, by ubiquitinating Tau, would produce any aggregated Tau as byproduct. First, it was established that HilD-Tau (P301S)-YFP fusions were competent for aggregation, by treating neurons nucleofected with this construct with an insoluble fraction of rodent brain, isolated from a transgenic mouse overexpressing mutant Tau. Aggregation of the HilD-Tau (P301S)-YFP was clearly visible, as shown by intense, punctate YFP fluorescence within the cell body and dendrites of neurons (FIG. 27).

[1664] In addition, the degradation sensitivity of HilD-Tau (P301S)-YFP in rat primary cortical neurons prepared from embryonic tissue, as well as in neurons and neuronal progenitors transfected from neurospheres derived from human embryonic stem cells was tested (FIGS. 28 and 29). In primary neurons, HilD-Tau (P301S)-YFP was tested for lenalidomide induced degradation both alone and when co-transfected with FLAG-tagged human Cereblon. Although so-called immunomodulatory drugs such as thalidomide and lenalidomide are reported to exhibit different effects in rodents than humans, such as teratogenicity, in this system lenalidomide induced degradation of HilD-Tau-YFP even when not co-transfected with human CRBN (FIG. 28). This indicates that this system may work in rodent systems, such as by knocking in the HilD Tau into transgenic mice to assess the impact of degrading Tau in neurodegenerative disease animal models. The HilD-Tau-YFP constructs demonstrated a subcellular distribution in neurons consistent with the physiological localization of Tau, across the cell body and processes. Lenalidomide degradation revealed a widespread reduction in Tau levels across the neuronal cell body, indicating that the system can be used to verify that the E3 ligase CRBN is likely to be distributed across compartments of the neuronal cell body. The use of the YFP label for this system also enabled straightforward determination of the kinetics of degradation, using repeated live-cell imaging across time. Degradation was robust in both rodent and human neurons (FIG. 29), serving as proof of principle for Tau targeted protein degradation in neurons. In neither case was there any visible evidence of aggregated Tau formed by the lenalidomide mediated recruitment of CRBN.

[1665] Because the HilD-Tau system can be induced to aggregate, it is envisioned that it can be used to assess situations in which aggregated Tau is or is not able to be ubiquitinated and degraded by the proteasome.

### Example 11: Evaluation of CAR19-HilD in Jurket Cells

[1666] This study examines the kinetics of lenalidomide on CAR19-HilD in Jurkat cells and whether CAR19 expression could return after lenalidomide was washed off cells.

### Methods

[1667] Cell treatment: CAR19-16GS-HilDtag-transduced Jurkat cells were diluted and seeded in two flasks. Once the cells were plated, one flask was treated with DMSO and the other with 10 μM lenalidomide for a time course harvest. 3 ml of cells from each flask were harvested for flow cytometry and western blot at 1, 2, 4, 6, 8, 12, and 24 hours post compound treatment. The cells in the lenalidomide-treated flask were split into two flasks at 24-hour time point. One was labelled “washout” and the other was “treatment”. Lenalidomide was washed out of the “washout” cells by centrifugation at 300 g and resuspended in fresh media three times, and the other half was split with the residual lenalidomide present in the medium from before (10 μM lenalidomide treatment was carried out only once). Cells were collected at 1, 2, 4, 6 hours post washout and 36, 48, 60 and 72 hours post compound treatment.

[1668] Western blot: Cells were pelleted, washed with PBS, and pellets were lysed with 50 μl RIPA buffer (Boston Bioproducts BP-115D) with protease inhibitors (Roche 04693124001). Lysates were centrifuged, supernatant transferred to new tubes and protein quantities read by Lowry Assay (BioRad 5000111). Each sample was normalized to 30 μg total protein in a 20 μl volume with 4× sample buffer (Thermo Scientific NP0007) and 10× reducing agent (Thermo Scientific NP0009). Samples were run on a 4-12% Bis-Tris acrylamide gel (Thermo Scientific WG1402BOX). The gels were run in duplicate, one to be probed against actin and the other against V5 or CD3Z. Gels were transferred to nitrocellulose membranes and the membranes were incubated overnight in 3% milk in TBS-0.1% Tween-20 with one of the following antibodies: mouse anti-actin (Sigma Aldrich A5441) at 1:10000 dilution and mouse anti-CD3z (BD 551034) at 1:1000 dilution. Blots were washed the following day in TBS-0.1% Tween-20, placed in 3% milk in TBS-0.1% Tween-20 with 1:10000 sheep-anti-mouse HRP secondary antibody (GE Healthcare NA931) at room temperature for 1 hour, then blots were washed and developed with ECL (Thermo Scientific 34076).

[1669] Flow cytometry: Cells were harvested in u bottom plate and washed using 1× PBS. The washed cells were stained with 100 μL Biotinylated Protein L (Genscript M00097) diluted at 1:1000× at 1p g/ml. The primary antibody was incubated at 4° C. for 45 mins. After incubation the cells were washed using PBS. Cells were incubated at 4° C. with PE conjugated Streptavidin (Jackson Lab 016-110-084) at 1:300× dilution for 30 mins. The cells were washed twice with PBS and suspended in 100 μL fixation buffer (2% Paraformaldehyde in PBS) for 10 mins at room temperature. The fixed cells were washed with PBS and suspended in 150 μL PBS. These cells were then acquired using BD LSRF Fortessa cell analyzer. The dead cells were excluded based on the size using the FSC and SSC plot. The live cells were analyzed for their PE CAR expression. FACS results were gated using unstained JNL parental cell line and 10k events were recorded for each sample.

### Results

[1670] As shown using Western blot in FIG. 30A, 10 μM lenalidomide degraded CAR19-HilD in a time-dependent manner and after lenalidomide was washed out, CAR19-HilD expression recovered. This observation was confirmed using flow cytometry analysis. Lenalidomide continued to degrade CAR19-HilD over time and washing out lenalidomide increased CAR19-HilD surface expression (FIG. 30B).

### Example 12: Evaluation of CAR19-HilD in Primary T Cells

[1671] This study analyzes the dose-response effect of lenalidomide on CAR expression and function in primary T cells.

[1672] First, the surface expression of CAR in CAR19-HILD CART cells with or without lenalidomide treatment for 24 and 48 hrs was examined. Second, the impact of lenalidomide on CAR T killing and cytokine production in the presence of CD19-expressing cells was analyzed.

### Methods

[1673] pELPS vector viral production: LentiX-293T cells (Clonetech 632180) were cultured in DMEM with 10% FBS at 37° C. and 5% CO₂. Cells were seeded in five 15 cm tissue culture plates (BD Biosciences 356451) at 14×10\hat{ }6 cells per plate in 25 ml of DMEM, 10% FBS and incubated overnight. On the following day, 15 μg of the pELPs vector was combined with a lenti-viral packaging mix (18 μg pRSV.REV, 18 μg pMDLg/p.RRE, and 7 μg pVSV-G), 90 μl Lipofectamine 2000 (Invitrogen 11668-019) and 3 ml OptiMEM (Invitrogen 11058021) per 15 cm plate and added to the plated cells. On the following day, the media was removed and replaced with 15 ml of fresh media. Cells were incubated for 30 hours and then virus was harvested, centrifuged at 500 g for 10 min, and filtered through a 0.45 μM cellulose acetate filter (Corning 430314). The viral supernatant was concentrated using Lenti-X concentrator (Clonetech 611232) at 4° C. overnight, pelleted at 1500 g for 45 min at 4° C., followed by supernatant aspiration and resuspension in DMEM, 10% FBS at 1/100th of the initial volume. Virus was aliquoted and stored at −80° C.

[1674] SUPT1 Titer: 100 μL of SUPT1 cells were plated at 2E5 cells/ml in a flat bottom 96 well plate. 50p L of diluted virus was added to the cells. The plate was incubated at 37° C. in CO₂ overnight. 100 μL RPMI media was added to each well and the plate was returned to the incubator. On Day 4 of transduction, the cells were harvested and stained for Protein L and CAR expression was analyzed using Flow Jo.

[1675] 10 days CART expansion: CART cells were generated by starting with apheresis product from healthy donors whose naive T cells were obtained by negative selection for T cells, CD3 lymphocytes. T cells were cultured at 0.5×10⁶ T cells in 1 mL medium per well of a 24-well plate. These cells were activated by the addition of CD3/CD28 beads (Dynabeads® Human T-Expander CD3/CD28) at a ratio of 1:3 (T cell to bead) in T cell media.

[1676] After 24 hours, T cells were left untransduced (UTD) or transduced at a multiplicity of infection (MOI) of 4 for CART19 or CART19-HilD. T cell growth was monitored by measuring the cell counts per mL, and T cells were diluted in fresh medium every two days. On day 7, 1 million cells were transferred to a 24 well plate to assess the effect of lenalidomide, at three different concentrations 1 μM, 0.1 μM, and 0.01 μM, for 24 hrs or 48 hrs. The percentage of transduced cells (cells expressing the CD19-specific CAR on the cell surface) was determined by flow cytometry analysis on a FACS Fortessa (BD).

### FACS Staining:

[1677] Cells were harvested and washed with PBS. The cells were then incubated with 100 μL Biotinylated Protein L at 4° C. for 45 mins. The cells were then washed using PBS and incubated at 4° C. with PE conjugated Streptavidin at 1:300× dilution and BV421 CD3 antibody at 1:200 dilution, for 30 mins. The cells were then washed twice with PBS and suspended in 100 μL fixation buffer 2% Paraformaldehyde for 10 mins at room temperature. The fixed cells were washed with PBS and suspended in 150 μL PBS. These cells were then acquired in a Fortessa instrument and the results analyzed using Flow Jo software.

[1678] The frozen CART cells were thawed in T cell media and co-cultured with either CD19 negative (K562 Cells) or CD19 positive target cells (Nalm6 cells), both expressing luciferase. Both the number of CART cells and the total number of T cells were normalized across samples; the latter was achieved by adding UTD cells. A titration of CART cells was done keeping the target cell number constant at 25,000 cells. The highest effector:T cell ratio (E:T) explored was 20:1 and a 8 point dilution curve was used. Lenalidomide was added at a 1 μM final concentration. The co-culture experiment was conducted in clear bottom black plates in a final volume of 200 μL. Upon a 20 hr incubation, 100 μL of supernatant was removed and cytokine levels were measured. To the rest, 100p L Bright-Glo Luciferase assay reagent (substrate+enzyme) was added and incubated for 10 minutes, at room temperature. The % Killing was measured using the formula: Specific lysis (%)=(1−(sample luminescence/average maximal luminescence))*100.

### Results

[1679] As shown in FIG. 31A, the transduction efficiency of CAR19 and CAR19-HilD was comparable. The fold expansion of primary T cells transduced with CAR19 or CAR19-HilD was also comparable. Lenalidomide treatment did not affect expression of CAR19 (FIG. 31B). In contrast, cells expressing CAR19-HilD showed dose-dependent reduction of CAR expression under lenalidomide treatment (FIG. 31C). The impact on CAR expression was more pronounced at 48 hours (FIG. 31C).

[1680] Low background killing against CD19 negative cells was observed across samples, regardless of the addition of lenalidomide (FIG. 32A). The ability of CART19 and CART19-HilD to kill CD19-positive cells in the absence of lenalidomide was comparable (FIGS. 32B and 32C). Upon lenalidomide addition, the killing curve of CART19-HilD slightly shifted (FIG. 32C).

[1681] CART19 and CART19 HilD secreted comparable levels of IFN gamma (FIG. 33A) and IL2 (FIG. 33B) in response to CD19 positive cells in absence of lenalidomide. In presence of lenalidomide, the levels of secreted IFN gamma and IL2 by CART19 HilD cells decreased (FIGS. 33A and 33B). The ability of CART19 to secrete cytokines was immune to the addition of lenalidomide (FIGS. 33A and 33B).

[1682] In summary, this study demonstrates that appending the HilD tag to the CAR19 structure has no impact on the ability of these CARTs to expand in culture. Lenalidomide leads to reduction of surface CAR expression in T cells expressing CAR19-HilD, in a dose dependent manner.

[1683] Activity of CART19 HilD is comparable to CART19, in the absence of lenalidomide. Killing and cytokine secretion by CART19.HilD cells is target cell-specific.

[1684] In the killing assay performed here, lenalidomide slightly impairs the ability of CART19-HilD to kill target cells. Under the experimental condition used herein, target cells start dying as soon as CARTs are co-added. The slight shift in cell killing in FIG. 32C is likely due to the fact that the kinetics of cell killing is probably faster than the kinetics of CAR19-HilD degradation.

[1685] Lenalidomide interferes with the ability of CART19.HilD, but not CART19, to secrete cytokines.

### Example 13: Evaluation of CAR19-HilD In Vivo

[1686] This study examines the in vivo activity of T cells expressing CAR19-HilD and its regulation by lenalidomide.

### Methods

### Xenograft Mouse Model

[1687] Female NOD.Cg-Prkdc^{scid} Il2^{tm1Wjl} mice (NSG) mice, 6-8 wk of age, were purchased from Jackson Laboratories. Animal studies were carried out under protocols approved by the Institutional Animal Care and Use Committee at NIBR. NSG mice were inoculated with 1.0×10⁶ luciferized Nalm-6 intravenously. Sever days later, CAR-T cells were infused intravenously into tumor-bearing mice; unless otherwise stated, lenalidomide were dosed orally at the same time. Tumor burden was measured by IVIS and was quantified as radiance in the region of interest (ROI), which was generally the area of one mouse. Mice were euthanized upon losing more that 20% of body weight or development of hind limb paralysis. Graft vs. host disease was defined in indicated animals as hair loss, behavioral changes, and clear decrease in health not attributable to Nalm-6 luciferase signal.

[1688] CAR expression analysis of splenocytes Spleens were harvested from the mice used in the in vivo efficacy study described above at the end of the study. Harvested spleen was homogenized into single cell suspension (spleens or spleen-derived cells were not pooled). Cells were washed with RPMI media and frozen in 1 mL freezing media. On the day of staining, cells were thawed in RPMI media with 10% serum. To block the CD16/CD32 receptors, cells were incubated with mouse Fc block (1:100 dilution), at room temperature, for 14 min. The cells were washed and incubated, at 4° C. for 45 min, with 100 μL of biotinylated protein, at a final concentration of 1 μg/mL. Upon PBS wash, cells were incubated at 4° C. with PE conjugated Streptavidin at 1:300 dilution, for 30 min. The cells were then washed twice with PBS and suspended in 100 μL of 2% paraformaldehyde fixation buffer, for 10 min at room temperature. The fixed cells were washed with PBS and suspended in 150 μL PBS. These cells were then acquired in a Fortessa instrument and the results analyzed using Flow Jo software.

[1689] Below is the group of mice from which spleen was harvested. Each group had three mice:
[1690] Group 1. —CART19.HilD (5×10⁶)
[1691] Group 2. —CART19-HilD (5×10⁶)+Lena qd
[1692] Group 3. —CART19-HilD (5×10⁶)+Lena bid
[1693] Group 4. —CART19.HilD (5×10⁶)+Lena+5Day

### Results

[1694] Lenalidomide had little effect on Nalm6 growth in vivo (data not shown).

[1695] To determine the therapeutic efficacy of CART19.HilD in vivo, tumor-bearing mice were treated with 5.0×10⁶, 2.5×10⁶ or 1.0×10⁶ CART19.HilD. While 5.0×10⁶ CART19.HilD yielded comparable rates of tumor regression to 2.5×10⁶ CART19, 2.5×10⁶ CART19.HilD could only partially control tumor growth (FIG. 34). 1.0×10⁶ CART19.HilD showed no efficacy (FIG. 34). In addition to dose-dependent activities, which was sustained for >40 d, lenalidomide treatment at 30 mg/kg bid can totally abolish the ability of CART19.HilD to control tumor growth in vivo (FIG. 34). Such results contrast the results obtained in vitro, in the tumor cytolysis assay shown in FIG. 32C. Loss of CART cells in peripheral blood after lenalidomide treatment also confirmed by flow cytometry (FIG. 35).

[1696] Control of adoptive transfer T cell function in vivo is important to prevent or overcome potential toxicities associated with CART therapy. Thus, it was further investigated whether CART19.HilD activity could be abolished after CART19.HilD had controlled the tumor. A time-course of lenalidomide dose study was performed in Nalm6 tumor-bearing NSG model. Mice dosed with lenalidomide immediately after CART19.HilD transfer lost the ability to control tumor growth in vivo (FIG. 36). Mice dosed with lenalidomide at day 5 after CART19HilD cell adoptive transfer showed tumor relapse a few days after lenalidomide dosing (FIG. 36). Activity of CART19.HilD was comparable to CART19 in the absence of lenalidomide (FIG. 36).

[1697] CAR expression in CD3+ cells derived from splenocytes of mice was analyzed. CAR expression in CD3 cells derived from mice treated with T cells expressing CAR19 or CAR19-HilD was comparable (FIG. 37E). All the mice treated with CAR19-HilD and lenalidomide showed significant reduced CAR expression in CD3 positive cells derived from spleen (FIGS. 37B-37E).

### Example 14: CARB-Tag Design

[1698] The CARBtag is based on an IKZF2-derived hairpin sequence which can be utilized as a degron tag along with Compound I-112 disclosed in Table 29.

[1699] IMiD compounds, such as lenalidomide, can induce degradation of IKZF1 and 3, but not IKZF2. The Compound I-112 was identified to specifically degrade IKZF2 but not IKZF1 or IKZF3. Since the HilDtag is based on the IKZF1/IKZF3 hairpin, it can only be degraded by IMiDs. This study explores whether an IKZF2-based hairpin (CARB-tag) can be degraded with the Compound I-112.

### Methods

[1700] Design: The initial CARBtag sequence came from the IKZF2 CDS (NM_016260). The N-terminal part of the tag is from H130-S174, and the C-terminal is from A230-D243. The complete amino acid sequence is:

(SEQ ID NO: 109)
HKRSHTGERPFHCNQCGASFTQKGNLLRHIKLHSGEKPFKCPFCSAGQ
VMSHHVPPMED

[1701] The above underlined region is the C-terminal portion. Like the HilDtag, the CARBtag is appended to a protein of interest with a 16GS linker (GGGGSGGGGTGGGGSG (SEQ ID NO: 28)). The 16GS-CARBtag DNA was designed with restriction enzyme sites on either side and was synthesized as a gBlock by Integrated DNA technologies. DNA sequence is shown below:

(SEQ ID NO: 110)
CAGTCAGTGGGCCTCGGCGGCCAAGCTTGGCAATCCGGTACTGTTGGT
gAAGCCAttCACCatgcataaaaggagtcacactggtgaacgcccctt
ccactgtaaccagtgtggagcttcttttactcagaagggcaaccttct
gagacacataaagttacactctggagagaagccgttcaaatgtccttt
ctgtagcgctgggcaggtcatgagtcaccatgtacctcctatggaaga
tggtggtggcgggagcggaggtggaggcacgggcggtggaggttcggg
gAacgttATGCTGGAAATGCTAGAATATAA

gBlocks were also designed and synthesized for the entire CAR19(CTL119) with the above CARBtag sequence. DNA sequence is shown below:

(SEQ ID NO: 111)
ccatttcaggtgtcgtgagcggccgctctagagccGAattCGgatcca
tggccctccctgtcaccgccctgctgcttccgctggctcttctgctcc
acgccgctcggcccgaaattgtgatgacccagtcacccgccactctta
gcctttcacccggtgagcgcgcaaccctgtcttgcagagcctcccaag
acatctcaaaataccttaattggtatcaacagaagcccggacaggctc
ctcgccttctgatctaccacaccagccggctccattctggaatccctg
ccaggttcagcggtagcggatctgggaccgactacaccctcactatca
gctcactgcagccagaggacttcgctgtctatttctgtcagcaaggga
acaccctgccctacacctttggacagggcaccaagctcgagattaaag
gtggaggtggcagcggaggaggtgggtccggcggtggaggaagccagg
tccaactccaagaaagcggaccgggtcttgtgaagccatcagaaactc
tttcactgacttgtactgtgagcggagtgtctctccccgattacgggg
tgtcttggatcagacagccaccggggaagggtctggaatggattggag
tgatttggggctcAgagactacttactaccaatcatccctcaagtcTc
gcgtcaccatctcaaaggacaactctaagaatcaggtgtcactgaaac
tgtcatctgtgaccgcagccgacaccgccgtgtactattgcgctaagc
attactattatggcgggagctacgcaatggattactggggacagggta
ctctggtcaccgtgtccagcaccactaccccagcaccgaggccaccca
ccccggctcctaccatcgcctcccagcctctgtccctgcgtccggagg
catgtagacccgcagctggtggggccgtgcatacccggggtcttgact
tcgcctgcgatatctacatttgggcccctctggctggtacttgcgggg
tcctgctgctttcactcgtgatcactctttactgtaagcgcggtcgga
agaagctgctgtacatctttaagcaacccttcatgaggcctgtgcaga
ctactcaagaggaggacggctgttcatgccggttcccagaggaggagg
aaggcggctgcgaactgcgcgtgaaattcagccgcagcgcagatgctc
cagcctaccagcaggggcagaaccagctctacaacgaactcaatcttg
gtcggagagaggagtacgacgtgctggacaagcggagaggacgggacc
cagaaatgggcgggaagccgcgcagaaagaatccccaagagggcctgt
acaacgagctccaaaaggataagatggcagaagcctatagcgagattg
gtatgaaaggggaacgcagaagaggcaaaggccacgacggactgtacc
agggactcagcaccgccaccaaggacacctatgacgctcttcacatgc
aggccctgccgcctcggggtggtggcgggagcggaggtggaggcacgg
gcggtggaggttcggggcataaaaggagtcacactggtgaacgcccct
tccactgtaaccagtgtggagcttcttttactcagaagggcaaccttc
tgagacacataaagttacactctggagagaagccgttcaaatgtcctt
tctgtagcgctgggcaggtcatgagtcaccatgtacctcctatggaag
atTAAgtcgacgcgtAACCCAGCTTTCTTGTACAAAGTGGTTGATATC
CAGCACAGTGGCGGCGCGCCATTCCGCCCCTCTCCCTC.

The immature amino acid sequence of CAR19-16GS-CARBtag is disclosed as SEQ ID NO: 112.

[1702] Cloning: The gBlocks were digested with restriction enzymes as was a mammalian expression vector with a CMV promoter driving either MITF (NM_000248) with a FLAG tag or CD19 (NM_001770) with a V5 tag, generating these final constructs: CD19-16GS-HilD-V5 (a construct described in Example 5), and CARBtag-16GS-MITF-FLAG.

[1703] The CTL119-16GS-CARBtag gBlocks were also digested with restriction enzymes but were cloned into a Lentiviral mammalian expression vector containing an EF1a promoter.

### Example 15: CARB-Tag Compound I-112 Dose Response Western Blot, Flow Cytometry and JNL CAR19 Functional Assay

[1704] This study aims to determine the efficacy of the CARB-tag on degrading CAR19 upon dosing Compound I-112.

### Methods

[1705] pNGX_LV_V002 vector viral production: HEK293T cells (ATCC CRL-3216) were cultured in DMEM with 10% FBS at 37° C. and 5% CO₂. Cells were seeded in collagen-coated 6 well plates at 0.75×10\hat{ }6 cells/well in 2 ml of DMEM, 10% FBS and incubated overnight. The following day the pNGX_LV_V002 vector (0.23 μg) and lentiviral packaging mix DNA (0.28 μg) (Cellecta CPC-K2A) were mixed with 1.5 μl TransIT transfection reagent (Mirus MIR2700) in 55.1 μl OptiMEM (Invitrogen 11058021) and added to the plated cells, which were incubated overnight. The following day the media was removed from the cells and 1 ml fresh media was added. Cells were incubated for 72 hours. Viral supernatant was harvested from cells and filtered through a 0.45 μM cellulose acetate filter (Corning 430516) and aliquoted and stored at −80° C.

[1706] Viral titer: Eight-fold dilution of virus was made starting at 1:3 times using RPMI and 10% FCS. 100 μL of SUPT1 cells were plated at 2E5 cells/ml in a flat bottom 96 well plate. 50 μL of diluted virus was added to the cells in duplicates. The plate was incubated at 37° C. in CO₂ overnight. 100p L RPMI media was added to each well and the plate was returned into the incubator. On Day 4 of transduction, the cells were harvested and stained for Protein L and CAR expression was analyzed using Flow Jo.

[1707] Cell treatment: Jurkat cells containing a NFAT luciferase reporter were infected with either CAR19 or CAR19-CARBtag at a multiplicity of infection (MOI) of 4. Cells were expanded for one week before using. Cells were diluted to 0.5×10\hat{ }6 in 3 ml total in 6 well dishes. Once cells were plated the samples were treated immediately with 10 μM, 1 μM, 0.1 μM, 0.01 μM and 0.001p M Compound I-112 and DMSO. All cells were harvested at 24 hours after initial compound treatment for western blotting and flow cytometry analysis.

[1708] Western Blot: Cells were pelleted, washed with PBS, and pellets were lysed with 50 μl RIPA buffer (Boston Bioproducts BP-115D) with protease inhibitors (Roche 04693124001). Lysates were centrifuged, supernatant transferred to new tubes and protein quantities read by Lowry Assay (BioRad 5000111). Each sample was normalized to 30 μg total protein in a 20 μl volume with 4× sample buffer (Thermo Scientific NP0007) and 10× reducing agent (Thermo Scientific NP0009). Samples were run on a 4-12% Bis-Tris acrylamide gel (Thermo Scientific WG1402BOX). The gels were run in duplicate, one for actin and the other for either V5 or CD3Z. Gels were transferred to nitrocellulose membranes and the membranes were incubated overnight in 3% milk in TBS-0.1% Tween-20 with one of the following antibodies: mouse anti-actin (Sigma Aldrich A5441) at 1:10000 dilution; and mouse anti-CD3z (BD 551034) at 1:1000 dilution. Blots were washed the following day in TBS-0.1% Tween-20, placed in 3% milk in TBS-0.1% Tween-20 with 1:10000 sheep-anti-mouse HRP secondary antibody (GE Healthcare NA931) at room temperature for 1 hour, then blots were washed and developed with ECL (Thermo Scientific 34076).

[1709] Flow cytometry: Cells were harvested in u bottom plate and washed using 1× PBS. The washed cells were stained with 100 μL Biotinylated Protein L (Genscript M00097) diluted at 1:1000× at 1 μg/ml. The primary antibody was incubated at 4° C. for 45 mins. After incubation the cells were washed using PBS. Cells were incubated at 4° C. with PE conjugated Streptavidin (Jackson Lab 016-110-084) at 1:300× dilution for 30 mins. The cells were washed twice with PBS and suspended in 100 μL fixation buffer (2% Paraformaldehyde in PBS) for 10 mins at room temperature. The fixed cells were washed with PBS and suspended in 150 μL PBS. These cells were then acquired using BD LSRF Fortessa cell analyzer. The dead cells were excluded based on the size using the FSC and SSC plot. The live cells were analyzed for their PE CAR expression. Flow cytometry results were gated using unstained JNL parental cell line and 10k events were recorded for each sample.

[1710] Jurkat NFAT luciferase (JNL) CAR Functional Assay: CAR19-CARB-tag cells were diluted to 0.5×10\hat{ }6 in 20 ml RPMI 1640 media (Thermo Fisher Scientific 11875-085) 10% FBS 1× pen/strep. 20 μl (0.5×10\hat{ }6 cells) of this cell line was plated in a white solid-bottom 384 well plates (Greiner789163-G). Compound I-112 was added to the 384 well plate at an 8-point ½-log dilution with 10 μM final top concentration using the Labcyte ECHO acoustic dispenser. Plates were incubated for 15 hours at 37° C., 5% CO₂. K562 and Nalm6 cells were re-suspended at 0.5×10\hat{ }6 cells/ml. Half of the 8-point Compound I-112 treated cells received 20 μl of K562 and the other half received 20 μl of Nalm6 cells. Cells were stored at 37° C., 5% CO₂ incubator for eight hours. Samples were then treated with 40 μl (1:1) Bright Glo (Promega E2620) and luminescence was read using Perkin Elmer's Viewlux with a 20 second exposure.

### Results

[1711] The protein levels of CAR19-CARBtag show a dose-dependent decrease after 24 hours of Compound I-112 treatment (FIG. 38A). Similarly, Compound I-112 treatment also reduced CAR surface expression in JNL CAR19-CARBtag cells (FIG. 38B). As shown in the JNL CAR functional assay described above, CAR19-CARBtag cells only respond to the CD19+ cells Nalm6 and this response is reduced in a dose-dependent manner with increasing amounts of compound treatment (FIG. 38C).

### Example 16: Use of the CARB-Tag and HilDtag as an Orthogonal System for Protein Degradation

[1712] This study aims to determine if CARB-tagged proteins can be degraded in cells upon Compound I-112 treatment. Also examined is when both a HilD-tagged protein and a CARB-tagged protein are co-expressed, if the expression of each protein can be regulated independently with either lenalidomide treatment (for HilD-tagged protein) or Compound I-112 treatment (for CARB-tagged protein).

### Methods

[1713] Cellular gene expression and treatment: HEK293T (ATCC CRL-3216) cells were cultured in DMEM with 10% FBS and pen/strep at 37° C. and 5% CO₂. The cells were transfected with either CARBtag-16GS-MITF-FLAG or CARBtag-16GS-MITF-FLAG and CD19-16GS-HilD-V5 using FuGene HD (Promega E2311) using a 3:1 FuGene HD to DNA ratio. Transfected cells were incubated for 24 hours, followed by treatment of either lenalidomide or Compound I-112 in a 4-point log dilution starting at 10 μM final. Cells were treated with the indicated compound for 24 hours and then were prepared for western blot.

[1714] Western blot: 24 hours after compound treatment, the cells were pelleted, washed with PBS, and pellets were lysed with 50 μl RIPA buffer (Boston Bioproducts BP-115D) with protease inhibitors (Roche 04693124001). Lysates were centrifuged, supernatant transferred to new tubes and protein quantities read by Lowry Assay (BioRad 5000111). Each sample was normalized to 30 μg total protein in a 20 μl volume with 4× sample buffer (Thermo Scientific NP0007) and 10× reducing agent (Thermo Scientific NP0009). Samples were run on a 4-12% Bis-Tris acrylamide gel (Thermo Scientific WG1402BOX). The gels were run in triplicate (one for each antibody). Gels were transferred to nitrocellulose membranes and the membranes were incubated overnight in 3% milk in TBS-0.1% Tween-20 with one of the following three antibodies: mouse anti-V5 (Thermo Scientific MA5-15253) at 1:1000 dilution; mouse anti-actin (Sigma Aldrich A5441) at 1:10000 dilution; and mouse anti-FLAG M2 (Sigma F3165) at 1:1000 dilution. Blots were washed the following day in TBS-0.1% Tween-20, then placed in 3% milk in TBS-0.1% Tween-20 with 1:10000 sheep-anti-mouse HRP secondary antibody (GE Healthcare NA931) at room temperature for one-hour, and then blots were washed and developed with ECL (Thermo Scientific 34076).

### Results

[1715] CARB-tagged MITF was effectively degraded by Compound I-112, but not lenalidomide (FIG. 39). In contrast, expression of CD19-HilDtag remained constant under different doses of Compound I-112 treatment (data not shown).

### Example 17: Characterization of BCMA CAR HilD-Tag Fusion Construct

[1716] This study aims to determine if HilD-tag can be utilized to degrade other CARs, e.g., a BCMA CAR. The BCMA CAR-16GS linker-HilD tag sequence is shown below. The HilD tag is single-underlined. The 16GS linker is double-underlined. The signal peptide is shown in italics.

(SEQ ID NO: 1450)
MALPVTALLLPLALLLHAARPEVQLVESGGGLVQPGGSLRLSCAVSGF
ALSNHGMSWVRRAPGKGLEWVSGIVYSGSTYYAASVKGRFTISRDNSR
NTLYLQMNSLRPEDTAIYYCSAHGGESDVWGQGTTVTVSSASGGGGSG
GRASGGGGSDIQLTQSPSSLSASVGDRVTITCRASQSISSYLNWYQQK
PGKAPKLLIYAASSLQSGVPSRFSGSGSGTDFTLTISSLQPEDFATYY
CQQSYSTPYTFGQGTKVEIKTTTPAPRPPTPAPTIASQPLSLRPEACR
PAAGGAVHTRGLDFACDIYIWAPLAGTCGVLLLSLVITLYCKRGRKKL
LYIFKQPFMRPVQTTQEEDGCSCRFPEEEEGGCELRVKFSRSADAPAY
QQGQNQLYNELNLGRREEYDVLDKRRGRDPEMGGKPRRKNPQEGLYNE
LQKDKMAEAYSEIGMKGERRRGKGHDGLYQGLSTATKDTYDALHMQAL
PPRGGGGSGGGGTGGGGSGMHKRSHTGERPFQCNQCGASFTQKGNLLR
HIKLHTGEKPFKCHLCNTASAEARHIKAEMG

### Methods

[1717] pELPS vector viral production: LentiX-293T cells (Clonetech 632180) were cultured in DMEM with 10% FBS at 37° C. and 5% CO₂. Cells were seeded in five 15 cm tissue culture plates (BD Biosciences 356451) at 14×10\hat{ }6 per plate in 25 ml of DMEM, 10% FBS and incubated overnight. The following day 15 μg of the pELPs vector was combined with a lenti-viral packaging mix (18 μg pRSV.REV, 18 μg pMDLg/p.RRE, and 7 μg pVSV-G), 90 μl Lipofectamine 2000 (Invitrogen 11668-019) and 3 ml OptiMEM (Invitrogen 11058021) per 15 cm plate and added to the plated cells. The following day the media was removed and replaced with 15 ml of fresh media. Cells were incubated for 30 hours, then virus was harvested, centrifuged at 500 g for 10 min, and filtered through a 0.45 μM cellulose acetate filter (Corning 430314). The viral supernatant was concentrated using Lenti-X concentrator (Clonetech 611232) at 4° C. overnight, pelleted at 1500 g for 45 min at 4° C., followed by supernatant aspiration and resuspension in DMEM, 10% FBS at 1/100^{th} of the initial volume. Virus was aliquoted and stored at −80° C.

[1718] Viral titer: Eight-fold dilution of virus was made starting at 1:3 times using RPMI and 10% FCS. 100p L of SUPT1 cells were plated at 2E5 cells/ml in a flat bottom 96 well plate. 50 μL of diluted virus was added to the cells in duplicates. The plate was incubated at 37° C. in CO₂ overnight. 100 μL RPMI media was added to each well and the plate was returned into the incubator. On Day 4 of transduction, the cells were harvested, stained for CAR expression and analyzed using Flow Jo.

[1719] Cell treatment: Jurkat cells containing a NFAT luciferase reporter were infected with BCMACAR-HilDtag at a multiplicity of infection (MOI) of 4. Cells were expanded for one week before using. BCMACAR HilD-tag JNL cells were diluted to 0.5×10\hat{ }6 in 3 ml total in 6 well dishes. Once the cells were plated, the samples were treated immediately with 10 μM, 1 μM, 0.1 μM, 0.01 μM and 0.001 μM lenalidomide or DMSO. All the cells were harvested at 24 hours after initial lenalidomide treatment for flow cytometry analysis.

[1720] Flow cytometry: Cells were harvested in u bottom plate and washed using 1× PBS. The washed cells were stained with anti-BCMACAR Alexa flour 647 conjugated antibody (BioLegend #94581) diluted at 1:300×. The primary antibody was incubated at 4° C. for 45 mins. After incubation the cells were washed twice with PBS and suspended in 100 μL Fixation buffer 2% Paraformaldehyde for 10 mins at room temperature. The fixed cells were washed with PBS and suspended in 150 μL PBS. These cells were then acquired using Fortessa instrument. The dead cells were excluded based on the size using the FSC and SSC plot. The live cells were analyzed for their APC CAR expression. Flow cytometry results were gated using unstained JNL parental cell line and 10k events were recorded for each sample.

[1721] Jurkat NFAT luciferase (JNL) CAR Functional Assay: The BCMACAR HilD-tag cell line was diluted to 0.5×10\hat{ }6 in 20 ml RPMI 1640 media (Thermo Fisher Scientific 11875-085) 10% FBS 1× pen/strep. 20 μl (0.5×10\hat{ }6 cells) of this cell line was plated in a white solid-bottom 384 well plates (Greiner789163-G). Lenalidomide was added to the 384 well plate at an 8-point ½-log dilution with 10 μM final top concentration using the Labcyte ECHO acoustic dispenser. Plates were incubated for 15 hours at 37° C., 5% CO₂. KMS11 cells were re-suspended at 0.5×10\hat{ }6 cells/ml. 20 μl of KMS11 cells were added to JNL cells and were stored at 37° C., 5% CO₂ incubator for eight hours. Samples were then treated with 40 μl (1:1) Bright Glo (Promega E2620) and luminescence was read using Perkin Elmer Viewlux with a 20 second exposure.

### Results

[1722] As shown in FIG. 40A, treatment with lenalidomide leads to a dose-dependent reduction of surface expression of BCMACAR HilD-tag. Jurkat NFAT luciferase cells expressing BCMACAR HilD-tag respond to BCMA-expressing KMS11 cells, as evidenced by an increase in luciferase activity, which can be inhibited in a dose-dependent manner with increasing amounts of lenalidomide treatment (FIG. 40B).

### Example 18: Synthesis of Exemplary Compounds

[1723] The compounds of the present disclosure can be prepared in a number of ways well known to those skilled in the art of organic synthesis. By way of example, compounds of the present disclosure can be synthesized using the methods described below, together with synthetic methods known in the art of synthetic organic chemistry, or variations thereon as appreciated by those skilled in the art. Preferred methods include but are not limited to those methods described below.

[1724] Compounds of the present disclosure can be synthesized by following the steps outlined in Scheme I which comprise different sequences of assembling intermediates A-1, A-2, A-3, A-4, A-5, A-5a, A-6a, A-6b, and A-7. Starting materials are either commercially available or made by known procedures in the reported literature or as illustrated. Scheme 1 is meant to provide general guidance in connection with preparing a selection of the compounds of the invention. One skilled in the art would understand that the steps shown in the Scheme can be modified or optimized using general knowledge of organic chemistry to prepare various compounds of the invention.

[chemical structure]

[1725] wherein P is an amine protecting group (e.g., tert-butyloxycarbonyl (Boc)) and X₁, R₁, R₂, Rₓ, n, and y are as defined above in Formula (III).

[1726] The general way of preparing Compounds of Formula (III), wherein [symbol] is a double bond and R₃ is absent and wherein [symbol] is a single bond and R₃ is hydrogen using intermediates A-1, A-2, A-3, A-4, A-5, A-5a, A-6a, A-6b, and A-7 is outlined in Scheme 1. A-1 may be prepared as reported in U.S. Patent Application US 2009/0142297. Cyclization of A-1 and 3-aminopiperidine-2,6-dione-HCl (A-2) in the presence of a mild base (e.g., potassium carbonate (K₂CO₃), cesium carbonate (Cs₂CO₃), etc.) in a solvent (e.g., dimethylformamide (DMF)) and optionally at elevated temperature provides A-3 as shown in Step 1. Coupling of A-3 with boronic ester A-4 using a catalyst (e.g., Pd(dppf)Cl₂·DCM), and a base (e.g., cesium carbonate (Cs₂CO₃)), in a solvent (e.g., N,N-dimethylformamide (DMF)) at elevated temperature yields A-5. Deprotection of A-5 using a strong acid such as trifluoroacetic acid (TFA) or hydrochloric acid (HCl) in a solvent (e.g., tetrahydrofuran (THF), 1,2,-dichloroethane, dioxane or dichloromethane (DCM)) optionally at elevated temperature to provide A-6a. Reductive amination of A-6a with aldehyde or ketone A-7 provides a compound of Formula (III) wherein [symbol] is a double bond and R₃ is absent. Alternatively, Compounds of Formula (III) wherein [symbol] is a double bond and R₃ is absent can be obtained by alkylation of A-6a with an alkyl halide A-7 in the presence of a base (e.g., NEt₃, Cs₂CO₃, etc.), in a solvent (e.g., DCM, DMF, etc.), and optionally at elevated temperature.

[1727] Hydrogenation of A-5 in the presence of a suitable catalyst (e.g., Pd/C or PtO₂) in a solvent (e.g., DMF) and under an atmosphere of hydrogen gas provides A-5a. Deprotection of A-5a using a strong acid such as trifluoroacetic acid (TFA) or hydrochloric acid (HCl) in a solvent (e.g., tetrahydrofuran (THF), 1,2,-dichloroethane, dioxane or dichloromethane (DCM)) optionally at elevated temperature to provide A-6b. Reductive amination of A-6b with aldehyde or ketone A-7 provides a compound of Formula (III) wherein [symbol] is a single bond and R₃ is hydrogen. Alternatively, Compounds of Formula (III) wherein [symbol] is a single bond and R₃ is hydrogen can be obtained by alkylation of A-6b with an alkyl halide A-7 in the presence of a base (e.g., NEt₃, Cs₂CO₃, etc.), in a solvent (e.g., DCM, DMF, etc.), and optionally at elevated temperature.

[1728] A mixture of enantiomers, diastereomers, and cis/trans isomers resulting from the process described above can be separated into their single components by chiral salt technique, chromatography using normal phase, reverse phase or chiral column, depending on the nature of the separation.

[1729] Any resulting racemates of compounds of the present disclosure or of intermediates can be resolved into the optical antipodes by known methods, e.g., by separation of the diastereomeric salts thereof, obtained with an optically active acid or base, and liberating the optically active acidic or basic compound. In particular, a basic moiety may thus be employed to resolve the compounds of the present disclosure into their optical antipodes, e.g., by fractional crystallization of a salt formed with an optically active acid, e.g., tartaric acid, dibenzoyl tartaric acid, diacetyl tartaric acid, di-O,O′-p-toluoyl tartaric acid, mandelic acid, malic acid, or camphor-10-sulfonic acid. Racemic compounds of the present disclosure or racemic intermediates can also be resolved by chiral chromatography, e.g., high pressure liquid chromatography (HPLC) using a chiral adsorbent.

[1730] Any resulting mixtures of stereoisomers can be separated on the basis of the physicochemical differences of the constituents, into the pure or substantially pure geometric or optical isomers, diastereomers, racemates, for example, by chromatography and/or fractional crystallization.

[1731] It should be understood that in the description and formula shown above, the various groups X₁, R₁, R₂, Rₓ, n, and y and other variables are as defined above, except where otherwise indicated. Furthermore, for synthetic purposes, the compounds of Scheme 1 are merely representative with elected radicals to illustrate the general synthetic methodology of the Compounds of Formula (III) as defined herein.

### Analytical Methods, Materials, and Instrumentation

[1732] Unless otherwise noted, reagents and solvents were used as received from commercial suppliers. Proton nuclear magnetic resonance (NMR) spectra were obtained on either Bruker Avance spectrometer or Varian Oxford 400 MHz spectrometer unless otherwise noted. Spectra are given in ppm (δ) and coupling constants, J, are reported in Hertz. Tetramethylsilane (TMS) was used as an internal standard. Chemical shifts are reported in ppm relative to dimethyl sulfoxide (δ 2.50), methanol (δ 3.31), chloroform (δ 7.26) or other solvent as indicated in NMR spectral data. A small amount of the dry sample (2-5 mg) is dissolved in an appropriate deuterated solvent (1 mL). The chemical names were generated using ChemBioDraw Ultra v12 from CambridgeSoft.

[1733] Mass spectra (ESI-MS) were collected using a Waters System (Acquity UPLC and a Micromass ZQ mass spectrometer) or Agilent-1260 Infinity (6120 Quadrupole); all masses reported are the m/z of the protonated parent ions unless recorded otherwise. The sample was dissolved in a suitable solvent such as MeCN, DMSO, or MeOH and was injected directly into the column using an automated sample handler. The analysis is performed on Waters Acquity UPLC system (Column: Waters Acquity UPLC BEH C18 1.7 μm, 2.1×30 mm; Flow rate: 1 mL/min; 55° C. (column temperature); Solvent A: 0.05% formic acid in water, Solvent B: 0.04% formic acid in MeOH; gradient 95% Solvent A from 0 to 0.10 min; 95% Solvent A to 20% Solvent A from 0.10 to 0.50 min; 20% Solvent A to 5% Solvent A from 0.50 to 0.60 min; hold at 5% Solvent A from 0.6 min to 0.8 min; 5% Solvent A to 95% Solvent A from 0.80 to 0.90 min; and hold 95% Solvent A from 0.90 to 1.15 min.

### Abbreviations Used in the Following Examples and Elsewhere Herein are

| | |
|---|---|
| br | broad |
| d | doublet |
| dd | doublet of doublets |
| ddd | doublet of doublet of |
| | doublets |
| dtd | doublet of triplet of |
| | doublets |
| Cs₂CO₃ | cesium carbonate |
| DCM | dichloromethane |
| DMA | N,N-dimethylacetamide |
| DMAP | 4-dimethylaminopyridine |
| DME | 1,2-Dimethoxyethane |
| DMF | N,N-dimethylformamide |
| DMSO | dimethylsulfoxide |
| EC₅₀ | half maximal effective concentration |
| Et₂O | diethyl ether |
| EtOAc | ethyl acetate |
| 4-Et-Py | 4-ethylpyridine |
| HCl | hydrogen chloride |
| HPLC | high performance liquid chromatography |
| h or hr | hour |
| g | gram |
| IC₅₀ | half maximal inhibitory concentration |
| K₂CO₃ | potassium carbonate |
| KI | potassium iodide |
| K₃PO₄ | tripotassium phosphate |
| KOAc | potassium acetate |
| m | multiplet |
| MeCN | acetonitrile |
| MeOH | methanol |
| mg | milligram |
| MHz | megahertz |
| min | minutes |
| mL | milliliter |
| mmol | millimole |
| M | molar |
| MS | mass spectrometry |
| NaHCO₃ | sodium bicarbonate |
| Na₂SO₄ | sodium sulfate |
| NEt₃ | triethylamine |
| NH₄OAc | ammonium acetate |
| NiBr₂(DME) | nickel (II) bromide ethylene glycol |
| | dimethyl ether complex |
| NMR | Nuclear magnetic resonance |
| PdCl₂(dppf)₂ | [1,1′-Bis (diphenylphosphino) |
| | ferrocene]palladium(II) dichloride |
| PdCl₂(dppf)•DCM | [1,1′-Bis (diphenylphosphino)ferrocene] |
| | dichloropalladium(II), complex with |
| | dichloromethane |
| q | quartet |
| qd | quartet of doublets |
| rt | room temperature |
| Rt | retention time |
| s | singlet |
| t | triplet |
| THF | tetrahydrofuran |
| TsCl | 4-toluenesulfonyl chloride |
| tt | triplet of triplets |
| UPLC | ultra-Performance Liquid Chromatography |

### Example 18-1: 3-(1-oxo-5-(piperidin-4-yl)isoindolin-2-yl)piperidine-2,6-dione (1-155)

[chemical structure]

[1736] To a stirred solution of methyl 4-bromo-2-(bromomethyl)benzoate (A-1, 15 g, 48.7 mmol) in DMF (150 mL) was added 3-aminopiperidine-2,6-dione-HCl (A-2, 6.9 g, 53.6 mmol) and K₂CO₃ (20.2 g, 146.1 mmol). The resulting mixture was heated at 70° C. for 16 h after which time the reaction mixture was cooled to room temperature and then concentrated to dryness. Water was then added and the mixture stirred at room temperature for 30 min. The resultant solid was filtered and washed with ether and ethyl acetate and dried under vacuum filtration to afford A-10 (10.6 g, 32.9 mmol, 67% yield). MS [M+H]⁺=323.0. ¹H NMR (400 MHz, DMSO-d₆) δ 10.99 (s, 1H), 7.91-7.88 (m, 1H), 7.72 (dd, J=8.1, 1.6 Hz, 1H), 7.67 (d, J=8.0 Hz, 1H), 5.11 (dd, J=13.3, 5.1 Hz, 1H), 4.47 (d, J=17.7 Hz, 1H), 4.34 (d, J=17.7 Hz, 1H), 2.98-2.83 (m, 1H), 2.65-2.55 (m, 1H), 2.45-2.29 (m, 1H), 2.01 (dtd, J=12.7, 5.3, 2.3 Hz, 1H).

### Step 2. tert-Butyl-4-(2-(2,6-dioxopiperidin-3-yl)-1-oxoisoindolin-5-yl)-3,6-dihydropyridine-1(2H)-carboxylate (A-12)

[1737] A solution of A-10 (1.8 g, 5.6 mmol) in DMF (10 mL) in a sealed tube was purged with argon for 5 min prior to addition of 3,6-dihydro-2H-pyridine-1-tert-butoxycarbonyl-4-boronic acid pinacol ester (A-11, 2.2 g, 7.2 mmol), K₃PO₄ (1.42 g, 6.7 mmol) and Pd(dppf)Cl₂·DCM (227 mg, 0.28 mmol). The reaction mixture was again purged with argon for 5 min and then heated at 90° C. for 16 h. After this time the reaction mixture was cooled to room temperature and then concentrated under reduced pressure. Water was added to the residue which was then extracted with EtOAc. The organic layer was washed with brine, dried over Na₂SO₄, filtered, and then concentrated under a reduced pressure. The crude compound was purified by silica gel chromatography, eluting with 70-80% of EtOAc in hexanes, to afford A-12 as a solid (1.0 g, 2.4 mmol, 42% yield). MS [M+H]⁺=426.3.

### Step 3. tert-Butyl 4-(2-(2,6-dioxopiperidin-3-yl)-1-oxoisoindolin-5-yl)piperidine-1-carboxylate (A-13)

[1738] To a stirred solution of A-12 (1.0 g, 2.35 mmol) in DMF (20 mL) was added 10% Pd/C (150 mg) and the mixture was stirred under a hydrogen atmosphere (balloon) at rt for 6 h. The reaction mixture was then filtered through a bed of Celite® filter aid. The filtrate was concentrated under reduced pressure affording A-12 as a solid (0.85 g, 1.97 mmol, 84% yield). MS [M-tBu]⁺=372.3. ¹H NMR (400 MHz, CDCl₃) δ 8.40 (s, 1H), 7.81 (d, J=7.9 Hz, 1H), 7.32 (d, J=8.0 Hz, 1H), 7.29 (s, 1H), 5.22 (dd, J=13.3, 5.1 Hz, 1H), 4.46 (d, J=16.0 Hz, 1H), 4.31 (d, J=16.1 Hz, 1H), 4.27 (d, J=16.2 Hz, 2H), 2.97-2.67 (m, 5H), 2.41-2.26 (m, 1H), 2.23-2.13 (m, 1H), 1.83 (d, J=12.6 Hz, 2H), 1.71-1.55 (m, 2H), 1.48 (s, 9H).

### Step 4. 3-(1-oxo-5-(piperidin-4-yl)isoindolin-2-yl)piperidine-2,6-dione hydrochloride (I-155)

[1739] To a stirred solution of A-12 (0.85 g, 2.0 mmol) in dioxane (10 mL) was added 4N HCl in dioxane (5.0 mL). The reaction mixture was then stirred at room temperature for 2 h. The reaction mass was concentrated under reduced pressure to afford the HCl salt of desired compound I-155 as a solid (0.65 g, 1.8 mmol, 90% yield, hydrochloride salt). MS [M+H]⁺=328.3. ¹H NMR (400 MHz, DMSO-d₆): δ 10.99 (s, 1H), 9.28 (s, 1H), 7.70 (d, J=7.8 Hz, 1H), 7.46 (s, 1H), 7.39 (d, J=8.0 Hz, 1H), 5.74 (s, 1H), 5.11 (dd, J=13.3, 5.2 Hz, 1H), 4.46 (d, J=17.3 Hz, 1H), 4.32 (d, J=17.3 Hz, 1H), 3.36 (d, J=11.5 Hz, 2H), 3.10-2.86 (m, 4H), 2.61 (d, J=14.8 Hz, 1H), 2.39 (qd, J=13.2, 4.3 Hz, 1H), 2.14-1.79 (m, 5H).

### Example 18-2: 3-(1-oxo-5-(2,2,6,6-tetramethylpiperidin-4-yl)isoindolin-2-yl)piperidine-2,6-dione (I-171)

[chemical structure]

### Step 1: 3-(1-oxo-5-(2,2,6,6-tetramethyl-1,2,3,6-tetrahydropyridin-4-yl)isoindolin-2-yl)-piperidine-2,6-dione (A-15)

[1741] A stirred solution of A-10 (150 mg, 0.46 mmol) in DMF (5 mL) in a sealed tube was purged with argon for 5 min prior to the addition of 2,2,6,6-tetramethyl-4-(4,4,5,5-tetramethyl-1,3,2-dioxaborolan-2-yl)piperidine (A-14, 185 mg, 0.69 mmol), Cs₂CO₃ (300 mg, 0.92 mmol) and Pd(dppf)Cl₂·DCM (19 mg, 0.02 mmol), and the resulting mixture was again purged with argon for 5 min. The reaction mixture was then heated at 90° C. for 5 h after which time the reaction mixture was cooled to room temperature, water was added, and the mixture was extracted with EtOAc. The organic layer was washed with brine, dried over Na₂SO₄, filtered, and then concentrated under reduced pressure. The crude material was purified by silica gel chromatography (eluting with 15% MeOH/DCM) to afford A-15 as a solid (35 mg, 0.092 mmol, 20% yield). MS [M+H]⁺=382.3.

[1742] Step 2. 3-(1-oxo-5-(2,2,6,6-tetramethylpiperidin-4-yl)isoindolin-2-yl)piperidine-2,6-dione (I-171) To a stirred solution of 3-(1-oxo-5-(2,2,6,6-tetramethyl-1,2,3,6-tetrahydropyridin-4-yl)isoindolin-2-yl)piperidine-2,6-dione (A-15, 25 mg, 0.07 mmol) in DMF (2 mL) was added Pd/C (5 mg). The resulting mixture was stirred under a hydrogen atmosphere (balloon) at room temperature for 5 h. The reaction mixture was then filtered through a Celite® filter aid pad and the filtrate was concentrated to dryness. The crude material was purified by reverse phase HPLC (MeCN/H₂O with 0.05% formic acid) to afford I-171 as a solid (11 mg, 0.03 mmol, 44% yield). MS [M+H]⁺=384.4. ¹H NMR (600 MHz, DMSO-d₆): δ 11.0 (s, 1H), 8.33-8.32 (m, 1H), 7.68 (d, J=8.0 Hz, 1H), 7.5 (s, 1H), 7.43 (d, J=8.4 Hz, 1H), 5.12 (dd, J=13.2, 4.8 Hz, 1H), 4.36 (d, J=17.4 Hz, 1H), 4.31 (d, J=17.4 Hz, 1H), 2.95-2.90 (m, 1H), 2.43-2.39 (m, 2H), 2.00-1.99 (m, 2H), 1.54-1.50 (m, 2H), 1.52-1.50 (m, 2H), 1.26 (s, 6H), 1.23 (s, 6H).

[1743] The following compounds were prepared according to the general protocol presented in Scheme 1 and the examples provided above:

| Compound No. | MS [M + 1]⁺ |
|---|---|
| I-1 | 356.1 |
| I-3 | 382.2 |
| I-4 | 384.1 |
| I-10 | 459.1 |
| I-11 | 424.6 |
| I-13 | 426.2 |
| I-14 | 432.1 |
| I-24 | 454.2 |
| I-26 | 454.1 |
| I-29 | 454.2 |
| I-31 | 443.1 |
| I-32 | 448.2 |
| I-36 | 443.2 |
| I-38 | 443.2 |
| I-39 | 448.4 |
| I-42 | 446.2 |
| I-43 | 458.2 |
| I-45 | 460.5 |
| I-51 | 502.1 |
| I-54 | 502.1 |
| I-56 | 486.2 |
| I-57 | 418.2 |
| I-58 | 419.2 |
| I-59 | 419.2 |
| I-60 | 419.2 |
| I-62 | 432.3 |
| I-63 | 450.2 |
| I-64 | 454.2 |
| I-65 | 445.2 |
| I-66 | 446.5 |
| I-67 | 448.2 |
| I-68 | 450.2 |
| I-69 | 450.2 |
| I-70 | 468.2 |
| I-71 | 460.8 |
| I-72 | 461.9 |
| I-73 | 468.2 |
| I-74 | 462.2 |
| I-75 | 460.3 |
| I-76 | 486.2 |
| I-77 | 484.2 |
| I-78 | 487.2 |
| I-79 | 484.2 |
| I-80 | 484.2 |
| I-81 | 472.3 |
| I-82 | 476.2 |
| I-83 | 476.2 |
| I-84 | 474.4 |
| I-86 | 475.2 |
| I-87 | 498.2 |
| I-88 | 490.2 |
| I-89 | 488.3 |
| I-90 | 494.1 |
| I-91 | 484.2 |
| I-93 | 484.2 |
| I-95 | 420.2 |
| I-97 | 452.4 |
| I-101 | 454.2 |
| I-104 | 458.2 |
| I-106 | 486.2 |
| I-107 | 474.3 |
| I-108 | 476.3 |
| I-110 | 486.3 |
| I-112 | 436.4 |
| I-113 | 486.1 |
| I-114 | 469.2 |
| I-115 | 422.2 |
| I-116 | 408.2 |
| I-117 | 422.2 |
| I-118 | 408.1 |
| I-119 | 407.2 |
| I-120 | 408.2 |
| I-121 | 436.2 |
| I-122 | 435.2 |
| I-123 | 434.2 |
| I-124 | 437.2 |
| I-125 | 478.2 |
| I-126 | 459.2 |
| I-127 | 459.2 |
| I-128 | 458.2 |
| I-129 | 436.2 |
| I-130 | 475.2 |
| I-131 | 459.2 |
| I-132 | 459.2 |
| I-134 | 463.2 |
| I-135 | 462.2 |
| I-136 | 457.2 |
| I-137 | 458.2 |
| I-139 | 461.2 |
| I-140 | 458.2 |
| I-141 | 491.2 |
| I-142 | 489.3 |
| I-143 | 481.2 |
| I-145 | 507.2 |
| I-146 | 448.2 |
| I-147 | 505.3 |
| I-148 | 484.2 |
| I-149 | 471.2 |
| I-151 | 485.2 |
| I-152 | 484.2 |
| I-154 | 484.2 |
| I-155 | 328.3 |
| I-156 | 470.3 |
| I-157 | 432.5 |
| I-158 | 432.5 |
| I-159 | 446.1 |
| I-160 | 432.3 |
| I-162 | 432.2 |
| I-163 | 340.3 |
| I-164 | 472.4 |
| I-168 | 472.4 |
| I-169 | 400.3 |
| I-170 | 404.5 |
| I-171 | 384.4. |
| I-172 | 416.4 |
| I-173 | 432.6 |
| I-174 | 446.1 |
| I-175 | 472.4 |
| I-176 | 414.2 |
| I-177 | 442.2 |
| I-178 | 386.2 |
| I-179 | 424.2 |
| I-180 | 461.2 |
| I-181 | 388.0 |
| I-183 | 342.0 |
| I-185 | 446.1 |
| I-187 | 432.1 |
| I-189 | 448.4 |
| I-191 | 384.4 |
| I-198 | 500.2 |
| I-199 | 486.2 |
| I-200 | 475.2 |
| I-201 | 485.2 |
| I-202 | 448.4 |
| I-203 | 472.2 |
| I-204 | 410.2 |
| I-205 | 546.3 |
| I-207 | 533.2 |
| I-208 | 489.2 |
| I-209 | 468.4 |
| I-210 | 426.3 |
| I-211 | 501.2 |
| I-212 | 450.2 |
| I-213 | 492.2 |
| I-214 | 469.2 |
| I-216 | 525.2 |
| I-217 | 444.2 |
| I-219 | 458.2 |
| I-221 | 500.2 |
| I-224 | 486.2 |
| I-225 | 565.2 |
| I-226 | 469.2 |
| I-227 | 531.3 |
| I-228 | 492.2 |
| I-229 | 608.2 |
| I-230 | 432.2 |
| I-231 | 476.2 |
| I-232 | 487.2 |
| I-233 | 567.2 |
| I-234 | 508.2 |
| I-235 | 453.2 |
| I-236 | 567.2 |
| I-237 | 525.2 |
| I-238 | 425.2 |
| I-239 | 470.2 |
| I-240 | 517.2 |
| I-241 | 500.2 |
| I-243 | 554.2 |
| I-244 | 542.2 |
| I-245 | 423.2 |
| I-246 | 409.2 |
| I-247 | 432.2 |
| I-248 | 462.2 |
| I-249 | 448.4 |
| I-251 | 499.2 |
| I-252 | 532.2 |
| I-253 | 410.0 |
| I-254 | 467.2 |
| I-255 | 525.3 |
| I-257 | 499.2 |
| I-258 | 491.3 |
| I-259 | 474.2 |
| I-266 | 492.1 |
| I-276 | 492.2 |
| I-300 | 542.3 |
| I-303 | 454.2 |

### Example 18-3: 3-(5-(8-benzyl-8-azabicyclo[3.2.1]octan-3-yl)-1-oxoisoindolin-2-yl)piperidine-2,6-dione HC(O)OH salt (I-265)

[chemical structure]

### Step 1. tert-butyl 3-(tosyloxy)-8-azabicyclo[3.2.1]octane-8-carboxylate (A-17)

[1745] To a stirred solution of 3-hydroxy-8-azabicyclo[3.2.1]octane-8-carboxylate (A-16, 570 mg, 2.51 mmol), Et₃N (0.52 mL, 3.8 mmol), and DMAP (61 mg, 0.50 mmol) in DCM (5 mL) was added TsCl (574 mg, 3.01 mmol) and the resulting mixture was stirred overnight at room temperature. The reaction mixture was then quenched with sat. aq. NaHCO₃ and extracted with DCM (3×). The combined organic phases were dried over Na₂SO₄, filtered, and concentrated, and the crude material was purified by silica gel chromatography eluting with 0% to 40% EtOAc in heptane to afford A-17 (91 mg, 0.22 mmol, 9% yield) as a solid. ¹H NMR (400 MHz, Chloroform-d) δ 7.79 (d, J=8.3 Hz, 2H), 7.36 (d, J=8.5 Hz, 2H), 4.83 (t, J=5.0 Hz, 1H), 4.16 (s, 2H), 2.47 (s, 3H), 2.12-2.02 (m, 4H), 2.00-1.90 (m, 2H), 1.84 (d, J=15.3 Hz, 2H), 1.45 (s, 9H).

### Step 2. tert-butyl 3-(2-(2,6-dioxopiperidin-3-yl)-1-oxoisoindolin-5-yl)-8-azabicyclo[3.2.1]-octane-8-carboxylate (A-20)

[1746] To a stirred suspension of A-18 (56 mg, 0.15 mmol), 56b (69 mg, 0.18 mmol), NiBr₂(DME) (4.7 mg, 0.015 mmol), 4,4′-di-tert-butyl-2,2′-dipyridyl (4.1 mg, 0.015 mmol), KI (25 mg, 0.15 mmol), and manganese powder (17 mg, 0.30 mmol) in DMA (0.7 mL) under an atmosphere of nitrogen was added 4-ethylpyridine (0.017 mL, 0.15 mmol) and the resulting mixture was stirred vigorously at 80° C. for 4 hours. The reaction mixture was then diluted with MeCN and filtered through a pad of Celite® filter aid eluting with MeCN. The filtrate was concentrated to dryness by azeotroping with heptane. The crude material was purified by silica gel chromatography eluting with 0% to 5% MeOH in DCM to afford A-20 (38.4 mg, 0.085 mmol, 56% yield) as a solid. MS [M+H]⁺=454.5. ¹H NMR (400 MHz, Chloroform-d) δ 8.58 (s, 1H), 7.80 (dd, J=7.9, 0.6 Hz, 1H), 7.32 (dd, J=7.9, 1.4 Hz, 1H), 7.29 (s, 1H), 5.23 (dd, J=13.3, 5.1 Hz, 1H), 4.46 (d, J=16.0 Hz, 1H), 4.39-4.24 (m, 3H), 3.20 (tt, J=11.8, 5.2 Hz, 1H), 2.94-2.74 (m, 2H), 2.34 (qd, J=12.8, 5.6 Hz, 1H), 2.23-2.13 (m, 1H), 2.09-2.02 (m, 2H), 1.90 (t, J=12.9 Hz, 2H), 1.80 (q, J=8.0, 6.6, 6.2 Hz, 2H), 1.76-1.69 (m, 2H), 1.51 (s, 9H).

### Step 3. 3-(5-(8-azabicyclo[3.2.1]octan-3-yl)-1-oxoisoindolin-2-yl)piperidine-2,6-dione hydrochloride (I-188)

[1747] To a stirred solution of A-20 (38 mg, 0.084 mmol) in THF (1 mL) was added 4 M HCl in dioxane (0.7 mL, 2.8 mmol) and the resulting mixture was stirred for 3 hours at 60° C. Formation of white precipitate was observed. The reaction mixture was then diluted with Et₂O and filtered. The precipitate was washed with Et₂O and then dried to afford the hydrochloride salt of I-188 (31.9 mg, 0.082 mmol, 98%) as a solid. MS [M+H]⁺=354.3. ¹H NMR (400 MHz, DMSO-d₆) δ 10.98 (s, 1H), 9.18 (s, 1H), 7.69 (dd, J=7.8, 2.3 Hz, 1H), 7.56 (s, 1H), 7.50 (d, J=7.9 Hz, 1H), 5.10 (ddd, J=13.2, 5.2, 2.1 Hz, 1H), 4.45 (d, J=18.1 Hz, 1H), 4.30 (dd, J=17.3, 2.2 Hz, 1H), 4.03 (s, 2H), 3.26-3.21 (m, 1H), 2.92 (tt, J=14.0, 5.2 Hz, 1H), 2.67-2.54 (m, 1H), 2.45-2.31 (m, 1H), 2.17 (t, J=13.1 Hz, 2H), 2.09-1.92 (m, 5H), 1.89-1.73 (m, 2H).

### Step 4. 3-(5-(8-benzyl-8-azabicyclo[3.2.1]octan-3-yl)-1-oxoisoindolin-2-yl)piperidine-2,6-dione HC(O)OH salt (I-265)

[1748] To a stirred solution of I-188 (20 mg, 0.051 mmol) and benzaldehyde (0.016 mL, 0.154 mmol) in DMF (1 mL) was added sodium triacetoxyborohydride (33 mg, 0.15 mmol) in one portion and the resulting mixture was stirred vigorously at room temperature overnight. One drop of HCOOH was then added and the reaction mixture was concentrated under reduced pressure. The crude material was purified by reverse phase HPLC (eluting with MeCN/H₂O with 0.1% formic acid) and the product lyophilized to afford the formate salt of I-265 (15.0 mg, 0.031 mmol, 60% yield) as a solid. MS [M+H]⁺=444.3. ¹H NMR (400 MHz, DMSO-d₆) δ 10.98 (s, 1H), 8.25 (s, 1H), 7.64 (d, J=7.9 Hz, 1H), 7.52 (s, 1H), 7.42 (d, J=8.1 Hz, 3H), 7.35-7.31 (m, 2H), 7.24 (t, J=7.3 Hz, 1H), 5.10 (dd, J=13.0, 5.0 Hz, 1H), 4.42 (d, J=17.2 Hz, 1H), 4.29 (d, J=17.1 Hz, 1H), 3.61 (s, 2H), 3.25 (s, 2H), 3.13-3.01 (m, 1H), 2.91 (ddd, J=17.9, 13.2, 5.3 Hz, 1H), 2.59 (d, J=17.0 Hz, 1H), 2.46-2.31 (m, 1H), 2.14-1.94 (m, 3H), 1.85 (t, J=12.4 Hz, 2H), 1.76 (d, J=7.8 Hz, 2H), 1.63 (d, J=12.7 Hz, 2H).

[1749] Compound I-260 was synthesized according to the route described in Example 18-3 (MS [M+H]⁺=404.2).

### Example 18-4: Diastereomers of 3-(5-(1-benzylazepan-4-yl)-1-oxoisoindolin-2-yl)piperidine-2,6-dione (I-190) and (I-273)

[chemical structure]

### Step 1: 3-(1-oxo-5-(4,4,5,5-tetramethyl-1,3,2-dioxaborolan-2-yl)isoindolin-2-yl)piperidine-2,6-dione (A-22a)

[1751] To a stirred solution of A-10 (3.0 g, 9.28 mmol) in DMF (20 mL) in a sealed tube was added bis(pinacolato)diboron (A-21, 2.6 g, 10.2 mmol), KOAc (2.37 g, 27.9 mmol), and PdCl₂(dppf)₂ (0.22 g, 0.28 mmol). The reaction mixture was purged with argon for 5 min, sealed, and then heated at 100° C. for 16 h. Water was added to the reaction mixture and stirred at room temperature for 15 min. The solid was precipitated, filtered, and dried under vacuum to afford A-22a as a solid (2.3 g, 6.2 mmol, 66% yield). MS [M+H]⁺=371.0.

### Step 2: tert-butyl 5-(2-(2,6-dioxopiperidin-3-yl)-1-oxoisoindolin-5-yl)-2,3,4,7-tetrahydro-1H-azepine-1-carboxylate (A-23)

[1752] tert-Butyl-5-(((trifluoromethyl)sulfonyl)oxy)-2,3,4,7-tetrahydro-1H-azepine-1-carboxylate A-22b was prepared as reported in PCT Application Publication No. 2007/111904.

[1753] To a stirred solution of A-22a (1.0 g, 2.70 mmol) in DMF (10.0 mL) in a sealed tube was added tert-butyl 5-(((trifluoromethyl)sulfonyl)oxy)-2,3,4,7-tetrahydro-1H-azepine-1-carboxylate (A-22b, 1.19 g, 3.24 mmol), Pd(PPh₃)₄(0.16 g, 0.13 mmol), and Na₂CO₃ (0.85 g, 8.10 mmol). The mixture was purged with argon for 5 min and then sealed and heated at 100° C. for 3 h. After this time, the reaction was cooled and water added prior to extraction with EtOAc. The organic layer was dried over Na₂SO₄, filtered, concentrated under reduced pressure, and purified by silica gel chromatography (eluting with 60-70% EtOAc/hexanes) to afford A-23 as a solid (350 mg, 0.796 mmol, 29% yield). MS [M+H]⁺=440.0.

### Step 3: tert-butyl 4-(2-(2,6-dioxopiperidin-3-yl)-1-oxoisoindolin-5-yl)azepane-1-carboxylate (A-24)

[1754] To a stirred solution of A-23 (0.35 g, 0.80 mmol) in THF (10 mL) was added PtO₂ (100 mg). The mixture was stirred under hydrogen balloon for 5 h. The reaction mixture was then filtered on a bed of Celite® filter aid and then concentrated under reduced pressure. The resulting residue was purified by silica gel chromatography (eluting with 40-50% EtOAc/hexane) to afford A-24 as a solid consisting of a mixture of diastereomers (0.31 g, 0.70 mmol, 88% yield). MS [M+H]⁺=442.0.

### Step 4a: chiral separation of tert-butyl 4-(2-(2,6-dioxopiperidin-3-yl)-1-oxoisoindolin-5-yl)azepane-1-carboxylate (A-24)

[1755] Chiral separation of A-24 (350 mg) was performed using a Kinetex (150 mm×21 mm), 5.0 μcolumn, with eluent consisting of mobile phase A=0.05% TFA in water; mobile phase B=acetonitrile and a flow rate of 20 mL/min at 25° C. with 20-70% mobile phase B: mobile phase A over 20 min. Under these conditions two compounds were isolated A-24 (peak 1) Rt=11.64 min and A-24 (peak 2) Rt=17.41 min). The fractions corresponding to peak 1 and peak 2 were collected and concentrated under reduced pressure then neutralized with aqueous saturated NaHCO₃ solution prior to extraction with DCM. The organic layers were combined, dried over Na₂SO₄, filtered, and concentrated to dryness affording peak 1 (50 mg) and peak 2 (45 mg) as white solids. MS [M+H]⁺=442.0.

### Step 4b: 3-(5-(azepan-4-yl)-1-oxoisoindolin-2-yl)piperidine-2,6-dione (I-166 & I-167)

[1756] To a stirred solution of A-24 (peak 1) (50 mg, 0.113 mmol) in dioxane (2.0 mL) at 0° C. was added 4M HCl in dioxane (0.5 mL). The reaction was then allowed to stir and warm up to room temperature over 2 h. The reaction mixture was then concentrated under reduced pressure to afford diastereomer A (40 mg, 0.106 mmol, 94%, hydrochloride salt). MS [M+H]⁺=342.3. ¹H NMR (CD₃OD, 300 MHz): δ 7.74 (d, J=8.1 Hz, 1H), 7.49 (1H, s), 7.43 (d, J=8.4 Hz, 1H), 5.14 (dd, J=13.5, 5.1 Hz, 1H), 4.48-4.46 (m, 2H), 3.74-3.71 (m, 1H), 3.68-3.63 (m, 2H), 3.59-3.55 (m, 1H), 3.44-3.37 (m, 2H), 3.02 (m, 1H), 2.90-2.78 (m, 2H), 2.51-2.47 (m, 1H), 2.16-2.08 (m, 5H), 2.00-1.80 (m, 2H).

[1757] To a stirred solution of A-24 (peak 2) (40 mg, 0.091 mmol) in dioxane (2.0 mL) at 0° C. was added 4M HCl in dioxane (0.5 mL). The reaction was then allowed to stir and warm up to rt over 2 h. The reaction mixture was then concentrated under reduced pressure to afford diastereomer B (30 mg, 0.079 mmol, 87% yield, hydrochloride salt). MS [M+H]⁺=342.4. ¹H NMR (CD₃OD, 300 MHz): δ 7.74 (d, J=7.5 Hz, 1H), 7.49 (s, 1H), 7.42 (d, J=7.8 Hz, 1H), 5.15 (dd, J=13.5, 5.1 Hz, 1H), 4.47-4.45 (d, 2H), 3.74-3.71 (m, 1H), 3.67-3.62 (m, 3H), 3.58-3.55 (m, 1H), 3.43-3.38 (m, 2H), 3.02 (m, 1H), 2.90-2.78 (m, 2H), 2.51-2.48 (m, 1H), 2.17-2.08 (m, 5H), 2.09-1.87 (m, 1H).

### Step 5. Diastereomers of 3-(5-(1-benzylazepan-4-yl)-1-oxoisoindolin-2-yl)piperidine-2,6-dione (I-190 and I-273)

[1758] Compound I-190 was prepared from I-166 (80 mg, 0.21 mmol) and benzaldehyde (27 mg, 0.25 mmol) via reductive amination. After complete consumption of starting materials, the crude reaction mixture was concentrated under reduced pressure and sat. aq. NaHCO₃ was added. The resulting mixture was extracted with DCM and the organic layer was dried over Na₂SO₄, filtered, and concentrated to dryness. The resulting solid was washed with ether (5 mL) and EtOAc (0.1 mL) affording I-190 as a solid (55 mg, 0.13 mmol, 60% yield). Absolute stereochemistry is not known and was arbitrarily assigned. MS [M+H]⁺=439.1. ¹H NMR (CD₃OD, 600 MHz): δ 7.69 (d, J=5.2 Hz, 1H), 7.44 (s, 1H), 7.39-7.36 (m, 3H), 7.32-7.30 (m, 2H), 7.26-7.24 (m, 1H), 5.12 (dd, J=8.8, 3.2 Hz, 1H), 4.47 (d, J=11.6 Hz, 1H), 4.41 (d, J=11.2 Hz, 1H), 3.71 (2H, s), 2.98-2.97 (m, 1H), 2.92-2.86 (m, 2H), 2.80-2.74 (m, 4H), 2.47-2.45 (m, 1H), 2.16-2.14 (m, 1H), 1.94-1.84 (m, 1H), 1.80 (m, 1H).

[1759] Compound I-273 was prepared from I-167 (80 mg, 0.21 mmol) and benzaldehyde (27 mg, 0.25 mmol) in a similar manner as describe above for I-190. I-273 was isolated as a solid (55 mg, 0.13 mmol, 60% yield). Absolute stereochemistry is not known and was arbitrarily assigned. MS [M+H]⁺=439.1. ¹H NMR (DMSO-d₆, 400 MHz): δ 11.0 (1H, s), 7.62 (d, J=5.2 Hz, 1H), 7.46 (s, 1H), 7.38-7.32 (m, 5H), 7.24-7.23 (m, 1H), 5.09 (dd, J=8.8, 3.6 Hz, 1H), 4.31 (d, J=11.6 Hz, 1H), 4.28 (d, J=11.6 Hz, 1H), 3.65 (d, J=9.1 Hz, 1H), 3.63 (d, J=9.2 Hz, 1H), 2.96-2.88 (m, 2H), 2.76-2.69 (m, 1H), 2.67-2.62 (m, 3H), 2.61-2.50 (m, 2H), 2.46-2.36 (m, 3H), 1.99 (m, 2H), 1.82 (m, 2H).

### Example 18-5: 3-(5-(1-benzyl-2-oxo-1,2-dihydropyridin-4-yl)-1-oxoisoindolin-2-yl)-piperidine-2,6-dione (I-192)

[chemical structure]

[1761] To a stirred suspension of A-22a (500 mg, 1.35 mmol), A-25 (428 mg, 1.62 mmol), and K₂CO₃ in DMF (5 mL) was added PdCl₂(dppf)·DCM (55 mg, 0.07 mmol) and the resulting mixture was sparged with argon for 10 min and then stirred at 130° C. for 90 min. After complete consumption of the starting material, the reaction mixture was quenched with ice-cold water and extracted with EtOAc (3×50 mL). The combined organic extracts were washed with brine, dried over Na₂SO₄, and concentrated under reduced pressure. The crude material was purified by silica gel chromatography eluting with 5% MeOH in DCM to afford I-192 as a solid (20 mg, 0.46 mmol, 35% yield). MS [M+H]⁺=427.8. ¹H NMR (400 MHz, DMSO-d₆): δ 10.98 (s, 1H), 7.94 (s, 1H), 7.90 (d, J=7.6 Hz, 1H), 7.80-7.76 (m, 2H), 7.33-7.25 (m, 5H), 6.76 (d, J=2.0 Hz, 1H), 6.64 (dd, J=7.2, 2.0 Hz, 1H), 5.12 (s, 2H), 5.12-5.08 (m, 1H), 4.48 (d, J=17.2 Hz, 1H), 4.36 (d, J=17.2 Hz, 1H), 2.80-2.75 (m, 1H), 2.60-2.53 (m, 1H), 2.45-2.38 (m, 1H), 2.02-1.97 (m, 1H).

[1762] The following compounds were synthesized according to the protocol described in Example 18-5:
[1763] I-184: MS [M+H]⁺=356.1.
[1764] I-186: MS [M+H]⁺=342.1.
[1765] I-192: MS [M+H]⁺=427.8.

### Example 18-6: 3-(1-oxo-5-(1,2,3,4-tetrahydroquinolin-4-yl)isoindolin-2-yl)piperidine-2,6-dione (I-196)

[chemical structure]

### Step 1: 3-(1-oxo-5-vinylisoindolin-2-yl)piperidine-2,6-dione (A-26)

[1767] To a solution of A-10 (1.5 g, 4.66 mmol) and tributyl(vinyl)stannane (2.04 mL, 6.95 mmol) in dioxane (15 mL) was added PdCl₂(PPh₃)₂(162 mg, 0.23 mmol) and the resulting mixture was purged with argon for 10 min and then stirred at 110° C. for 1 h in the microwave. After complete consumption of the starting material, the reaction mixture was quenched with water and extracted with EtOAc (2×50 mL). The combined organic extracts were washed with brine, dried over Na₂SO₄, and concentrated under reduced pressure. The obtained crude material was purified by silica gel chromatography eluting with 90% EtOAc in hexane. The pure fractions were collected and evaporated under reduced pressure to afford A-26 as a solid (500 mg, 1.85 mmol, 40% yield). MS [M+H]⁺=271.2.

### Step 2: 3-(1-oxo-5-(1,2,3,4-tetrahydroquinolin-4-yl)isoindolin-2-yl)piperidine-2,6-dione (I-196)

[1768] To a solution of A-26 (200 g, 0.74 mmol) and (azidomethyl)benzene (118 mg, 0.89 mmol) in DCM (4 mL) was added triflic acid (0.08 mL, 0.89 mmol) and the resulting mixture was stirred at room temperature for 2 h. After complete consumption of the starting material, the reaction mixture was quenched with water and extracted with EtOAc (2×50 mL). The combined organic extracts were washed with brine, dried over Na₂SO₄ and concentrated under reduced pressure. The obtained crude material was purified by reverse phase HPLC (eluting with 0.01% NH₄OAc in MeCN) to afford I-196 as a solid (15 mg, 0.04 mmol, 6% yield). MS [M+H]⁺=376.2. ¹H NMR (400 MHz, DMSO-d₆): δ 10.96 (s, 1H), 7.66 (d, J=8.0 Hz, 1H), 7.32-7.23 (m, 2H), 6.92 (t, J=7.6 Hz, 1H), 6.59-6.55 (m, 2H), 6.41 (t, J=7.2 Hz, 1H), 5.08 (dd, J=13.2, 5.2 Hz, 1H), 4.44-4.23 (m, 3H), 3.24-3.18 (m, 1H), 3.10-3.05 (m, 1H), 2.95-2.86 (m, 1H), 2.66-2.50 (m, 2H), 2.42-2.31 (m, 1H), 2.10-1.98 (m, 3H).

[1769] Compound I-197 was synthesized in the same manner described above in Example 18-6. I-197: MS [M+H]⁺=466.2.

### EQUIVALENTS

[1770] The disclosures of each and every patent, patent application, and publication cited herein are hereby incorporated herein by reference in their entireties. While this invention has been disclosed with reference to specific aspects, it is apparent that other aspects and variations of this invention may be devised by others skilled in the art without departing from the true spirit and scope of the invention. The appended claims are intended to be construed to include all such aspects and equivalent variations.

1. A fusion polypeptide comprising a compound of Formula (I) (COF1)/CRBN (cereblon)-binding polypeptide and a heterologous polypeptide, wherein the compound of Formula (I) is: [chemical structure]
or a pharmaceutically acceptable salt, ester, hydrate, solvate, or tautomer thereof, wherein:
X is O or S;
R¹ is C₁-C₆ alkyl, C₂-C₆ alkenyl, C₂-C₆ alkynyl, C₁-C₆ heteroalkyl, carbocyclyl, heterocyclyl, aryl, or heteroaryl, each of which is independently and optionally substituted by one or more R⁴;
each of R^{2a} and R^{2b} is independently hydrogen or C₁-C₆ alkyl; or R^{2a} and R^{2b} together with the carbon atom to which they are attached form a carbonyl group or a thiocarbonyl group;
each of R³ is independently C₁-C₆ alkyl, C₂-C₆ alkenyl, C₂-C₆ alkynyl, C₁-C₆ heteroalkyl, halo, cyano, —C(O)R^{A}, —C(O)OR^{B}, —OR^{B}, —N(R^{C})(R^{D}), —C(O)N(R^{C})(R^{D}), —N(R^{C})C(O)R^{A}, —S(O)_{X}R^{E}, —S(O)ₓN(R^{C})(R^{D}), or —N(R^{C})S(O)ₓR^{E}, wherein each alkyl, alkenyl, alkynyl, and heteroalkyl is independently and optionally substituted with one or more R⁶;
each R⁴ is independently C₁-C₆ alkyl, C₂-C₆ alkenyl, C₂-C₆ alkynyl, C₁-C₆ heteroalkyl, halo, cyano, oxo, —C(O)R^{A}, —C(O)OR^{B}, —OR^{B}, —N(R^{C})(R^{D}), —C(O)N(R^{C})(R^{D}), —N(R^{C})C(O)R^{A}, —S(O)_{X}R^{E}, —S(O)ₓN(R^{C})(R^{D}), —N(R^{C})S(O)_{X}R^{E}, carbocyclyl, heterocyclyl, aryl, or heteroaryl, wherein each alkyl, alkenyl, alkynyl, heteroalkyl, carbocyclyl, heterocyclyl, aryl, and heteroaryl is independently and optionally substituted with one or more R⁷;
each of R^{A}, R^{B}, R^{C}, R^{D}, and R^{E} is independently hydrogen or C₁-C₆ alkyl;
each R⁶ is independently C₁-C₆ alkyl, oxo, cyano, —OR^{B}, —N(R^{C})(R^{D}), —C(O)N(R^{C})(R^{D}), —N(R^{C})C(O)R^{A}, aryl, or heteroaryl, wherein each aryl and heteroaryl is independently and optionally substituted with one or more R⁸;
each R⁷ is independently halo, oxo, cyano, —OR^{B}, —N(R^{C})(R^{D}), —C(O)N(R^{C})(R^{D}), or —N(R^{C})C(O)R^{A};
each R⁸ is independently C₁-C₆ alkyl, cyano, —OR^{B}, —N(R^{C})(R^{D}), —C(O)N(R^{C})(R^{D}), or —N(R^{C})C(O)R^{A};
n is 0, 1, 2, 3 or 4; and
x is 0, 1, or 2.

2. The fusion polypeptide of claim 1, wherein the COF1/CRBN-binding polypeptide is:
(a) fused to the heterologous polypeptide;
(b) linked to the heterologous polypeptide by a peptide bond;
(c) linked to the heterologous polypeptide by a bond other than a peptide bond;
(d) linked directly to the COF1/CRBN-binding polypeptide;
(e) linked indirectly to the COF1/CRBN-binding polypeptide; or
(f) operatively linked to the heterologous polypeptide via a linker, a glycine serine linker, or a linker comprising the amino acid sequence of SEQ ID NO: 28.

3-8. (canceled)

9. The fusion polypeptide of claim 1, wherein the association of the COF1/CRBN-binding polypeptide or the fusion polypeptide with cereblon (CRBN) in the absence of COF1 is no more than 0.01%, 0.1%, 1%, 5%, 10%, 15%, or 20% of the association of the COF1/CRBN-binding polypeptide or the fusion polypeptide with CRBN in the presence of COF1.

10-15. (canceled)

16. The fusion polypeptide of claim 1, wherein the degradation or ubiquitination of the fusion polypeptide in the absence of COF1 is no more than 0.01%, 0.1%, 1%, 10%, 20%, 30%, 40%, 50%, 60%, or 70% of the degradation or ubiquitination of the fusion polypeptide in the presence of COF1.

17-18. (canceled)

19. The fusion polypeptide of claim 1, wherein the COF1/CRBN-binding polypeptide;
(a) is between 10 and 95 amino acid residues in length, between 15 and 90 amino acid residues in length, between 20 and 85 amino acid residues in length, between 25 and 80 amino acid residues in length, between 30 and 75 amino acid residues in length, between 35 and 70 amino acid residues in length, between 40 and 65 amino acid residues in length, between 45 and 65 amino acid residues in length, between 50 and 65 amino acid residues in length, or between 55 and 65 amino acid residues in length;
(b) comprises a beta turn, a beta hairpin, a beta strand, or an alpha helix;
(c) comprises, from N-terminus to C-terminus, a first beta strand, a beta hairpin, a second beta strand, and a first alpha helix; or
(d) from N-terminus to C-terminus, a first beta strand, a beta hairpin, a second beta strand, a first alpha helix, and a second alpha helix.

20-26. (canceled)

27. The fusion polypeptide of claim 1, wherein the COF1/CRBN-binding polypeptide comprises:
(a) a naturally occurring IKZF polypeptide or a COF1/CRBN-binding variant thereof, or a naturally occurring IKZF1, IKZF2, IKZF3, IKZF4, IKZF5, or a COF1/CRBN-binding variant thereof, or at least one less lysine than the corresponding native sequence;
(b) two or more discontinuous sequences from a naturally occurring IKZF polypeptide, or a naturally occurring IKZF1, IKZF2, IKZF3, IKZF4, or IKZF5; or
(c) an IKZF polypeptide, an IKZF1 polypeptide, an IKZF3 polypeptide, an IKZF2 polypeptide having H141Q substitution (numbered according to SEQ ID NO: 21), or an IKZF4 polypeptide having H1880 substitution (numbered according to SEQ ID NO: 22), or a structural motif thereof.

28-35. (canceled)

36. The fusion polypeptide of claim 1, wherein the COF1/CRBN-binding polypeptide comprises;
(a) amino acid residues 136-180 of IKZF3 (numbered according to SEQ ID NO: 19), or the amino acid sequence of SEQ ID NO: 5, or a sequence that differs from amino acid residues 136-180 of IKZF3 (numbered according to SEQ ID NO: 19) by no more than 1, 2, 3, 4, 5, 10, 15, 20, 25, 30, 35, or 40 amino acid residues:
(b) amino acid residues 136-170 of IKZF3 (numbered according to SEQ ID NO: 19) or a sequence that differs from amino acid residues 136-170 of IKZF3 (numbered according to SEQ ID NO: 19) by no more than 1, 2, 3, 4, 5, 10, 15, 20, 25, or 30 amino acid residues;
(c) amino acid residues 136-139 of IKZF3 (numbered according to SEQ ID NO: 19);
(d) amino acid residues 236-249 of IKZF3 (numbered according to SEQ ID NO: 19), or the amino acid sequence of SEQ ID NO: 11, or a sequence that differs from amino acid residues 236-249 of IKZF3 (numbered according to SEQ ID NO: 19) by no more than 1, 2, 3, 4, 5, 6, or 7 amino acid residues;
(e) the amino acid sequence of MALEKMALEKMALE (SEO ID NO: 91);
(f) a first sequence comprising amino acid residues 136-180 of IKZF3 (numbered according to SEQ ID NO: 19) or a first sequence that differs from amino acid residues 136-180 of IKZF3 (numbered according to SEQ ID NO: 19) by no more than 1, 2, 3, 4, 5, 10, 15, 20, 25, 30, 35, or 40 amino acid residues; and a second sequence comprising amino acid residues 236-249 of IKZF3 (numbered according to SEQ ID NO: 19) or a second sequence that differs from amino acid residues 236-249 of IKZF3 (numbered according to SEQ ID NO: 19) by no more than 1, 2, 3, 4, 5, 6, or 7 amino acid residues;
(g) the amino acid sequence of SEQ ID NO: 1 or 3;
(h) a first sequence comprising amino acid residues 136-180 of IKZF3 (numbered according to SEQ ID NO: 19) and a second sequence comprising the amino acid sequence of
(SEQ ID NO: 91)
MALEKMALEKMALE,
(i) an amino acid sequence selected from the group consisting of SEQ ID NOs: 4, 41, 42, and 43; or
(j) the amino acid sequence of SEQ ID NO: 2 or 4.

37-75. (canceled)

76. The fusion polypeptide of claim 1, wherein the COF1 is an immunomodulatory imide drug (IMiD), or a pharmaceutically acceptable salt thereof, or is selected from the group consisting of lenalidomide, pomalidomide, thalidomide, and 2-(4-(tert-butyl)phenyl)-N-((2-(2,6-dioxopiperidin-3-yl)-1-oxoisoindolin-5-yl)methyl)acetamide, or a pharmaceutically acceptable salt thereof.

77-79. (canceled)

80. The fusion polypeptide of claim 1, wherein the fusion polypeptide further comprises a degradation domain, wherein the degradation domain is separated from the COF1/CRBN-binding polypeptide and the heterologous polypeptide by a heterologous protease cleavage site.

81. The fusion polypeptide of claim 80, wherein the fusion polypeptide comprises, from N-terminus to C-terminus:
i) the degradation domain, the heterologous protease cleavage site, the heterologous polypeptide, and the COF1/CRBN-binding polypeptide;
ii) the degradation domain, the heterologous protease cleavage site, the COF1/CRBN-binding polypeptide, and the heterologous polypeptide;
iii) the COF1/CRBN-binding polypeptide, the heterologous polypeptide, the heterologous protease cleavage site, and the degradation domain; or
iv) the heterologous polypeptide, and the COF1/CRBN-binding polypeptide, the heterologous protease cleavage site, and the degradation domain; and/or
wherein the degradation domain is chosen from an estrogen receptor (ER) domain, an FKB protein (FKBP) domain, or a dihydrofolate reductase (DHFR) domain.

82. (canceled)

83. A fusion polypeptide comprising a first domain and a second domain separated by a heterologous protease cleavage site, wherein the first domain comprises a degradation domain and the second domain comprises a compound of Formula (II) (COF2)/CRBN (cereblon)-binding polypeptide and a heterologous polypeptide, wherein the compound of Formula (II) is: [chemical structure]
or a pharmaceutically acceptable salt, ester, hydrate, tautomer, or prodrug thereof, wherein:
X is O or S;
R¹ is C₁-C₆ alkyl, C₂-C₆ alkenyl, C₂-C₆ alkynyl, C₁-C₆ heteroalkyl, carbocyclyl, heterocyclyl, aryl, or heteroaryl, each of which is independently and optionally substituted by one or more R⁴;
each of R^{2a} and R^{2b} is independently hydrogen or C₁-C₆ alkyl; or R^{2a} and R^{2b} together with the carbon atom to which they are attached to form carbonyl group or thiocarbonyl group;
each of R¹⁰ is independently C₁-C₆ alkyl, C₂-C₆ alkenyl, C₂-C₆ alkynyl, C₁-C₆ heteroalkyl, halo, cyano, —C(O)R^{A}, —C(O)OR^{B}, —OR^{B}, —N(R^{C})(R^{D}), —C(O)N(R^{C})(R^{D}), —N(R^{C})C(O)R^{A}, —S(O)_{X}R^{E}, —S(O)ₓN(R^{C})(R^{D}), or —N(R^{C})S(O)ₓR^{E}, or L-Tag; wherein each alkyl, alkenyl, alkynyl, and heteroalkyl is independently and optionally substituted with one or more R¹¹;
each R⁴ is independently C₁-C₆ alkyl, C₂-C₆ alkenyl, C₂-C₆ alkynyl, C₁-C₆ heteroalkyl, halo, cyano, oxo, C(O)R^{A}, —C(O)OR^{B}, OR^{B}, —N(R^{C})(R^{D}), —C(O)N(R^{C})(R^{D}), —N(R^{C})C(O)R^{A}, S(O)ₓR^{E}, —S(O)ₓN(R^{C})(R^{D}), —N(R^{C})S(O)_{X}R^{E}, carbocyclyl, heterocyclyl, aryl, or heteroaryl, wherein each alkyl, alkenyl, alkynyl, heteroalkyl, carbocyclyl, heterocyclyl, aryl, and heteroaryl is independently and optionally substituted with one or more R⁷;
each of R^{A}, R^{B}, R^{C}, R^{D}, and R^{E} is independently hydrogen or C₁-C₆ alkyl;
each R¹¹ is independently C₁-C₆ alkyl, halo, oxo, cyano, —OR^{B}, —N(R^{C})(R^{D}), —C(O)N(R^{C})(R^{D}), —N(R^{C})C(O)R^{A}, aryl, or heteroaryl, wherein each aryl and heteroaryl is independently and optionally substituted with one or more R⁸;
each R⁷ is independently halo, oxo, cyano, —OR^{B}, —N(R^{C})(R^{D}), —C(O)N(R^{C})(R^{D}), or —N(R^{C})C(O)R^{A};
each R⁸ is independently C₁-C₆ alkyl, halo, cyano, —OR^{B}, —N(R^{C})(R^{D}), —C(O)N(R^{C})(R^{D}), or —N(R^{C})C(O)R^{A};
each L is independently C₁-C₆ alkyl, C₂-C₆ alkenyl, C₂-C₆ alkynyl, C₁-C₆ heteroalkyl, —C(O)R^{A1}, —C(O)OR^{B1}, —OR^{B1}, —N(R^{C1})(R^{D1}), —C(O)N(R^{C1})(R^{D1}), —N(R^{C1})C(O)R^{A1}, —S(O)ₓR^{E1}, —S(O)ₓN(R^{C1})(R^{D1}), or —N(R^{C1})S(O)ₓR^{E1}, wherein each alkyl, alkenyl, alkynyl, and heteroalkyl is independently and optionally substituted with one or more R¹²;
each Tag is a targeting moiety capable of binding to a target protein;
each of R^{A1}, R^{B1}, R^{C1}, R^{D1}, and R^{E1} is independently hydrogen, C₁-C₆ alkyl, C₂-C₆ alkenyl, C₂-C₆ alkynyl, C₁-C₆ heteroalkyl, carbocyclyl, heterocyclyl, aryl, or heteroaryl, wherein each alkyl, alkenyl, alkynyl, heteroalkyl, carbocyclyl, heterocyclyl, aryl, and heteroaryl is independently and optionally substituted with one or more R¹²;
each R¹² is independently C₁-C₆ alkyl, halo, cyano, carbocyclyl, or heterocyclyl;
n is 0, 1, 2, 3 or 4; and
x is 0, 1, or 2.

84-98. (canceled)

99. The fusion polypeptide of claim 80, wherein the heterologous protease cleavage site;
(a) is cleaved by a mammalian intracellular protease or by a protease selected from the group consisting of furin, PCSK1, PCSK5, PCSK6, PCSK7, cathepsin B, Granzyme B, Factor XA, Enterokinase, genenase, sortase, precission protease, thrombin, TEV protease, and elastase 1;
(b) comprises a sequence having a cleavage motif selected from the group consisting of Arg-X-Lys/Arg-Arg consensus motif (X can be any amino acid; SEQ ID NO: 52), Arg-X-X-X-Lys/Arg-Arg consensus motif (X can be any amino acid; SEQ ID NO: 53), Arg-Arg-X consensus motif (SEQ ID NO: 54), Ile-Glu-Pro-Asp-X consensus motif (SEQ ID NO: 55), Ile-Glu/Asp-Gly-Arg (SEQ ID NO: 56), Asp-Asp-Asp-Asp-Lys (SEQ ID NO: 57), Pro-Gly-Ala-Ala-His-Tyr (SEQ ID NO: 58), Leu-Pro-X-Thr-Gly/Ala consensus motif (SEQ ID NO: 59), Leu-Glu-Val-Phe-Gln-Gly-Pro (SEQ ID NO: 60), Leu-Val-Pro-Arg-Gly-Ser (SEQ ID NO: 61), Glu-Asn-Leu-Tyr-Phe-Gln-Gly (SEQ ID NO: 62), and [Ala/Gly/Ser/Val]-X (X can be any amino acid; SEQ ID NO: 63);
(c) is cleaved by furin or comprises a furin cleavage site selected from the group consisting of
(SEQ ID NO: 123)
RTKR;
(SEQ ID NO: 125)
GTGAEDPRPSRKRRSLGDVG;
(SEQ ID NO: 127)
GTGAEDPRPSRKRR;
(SEQ ID NO: 129)
LQWLEQQVAKRRTKR;
(SEQ ID NO: 131)
GTGAEDPRPSRKRRSLGG;
(SEQ ID NO: 133)
GTGAEDPRPSRKRRSLG;
(SEQ ID NO: 135)
SLNLTESHNSRKKR;
(SEQ ID NO: 137)
CKINGYPKRGRKRR;
and
(SEQ ID NO: 34)
SARNRQKR;
(d) is cleaved by a mammalian extracellular protease or by a mammalian extracellular protease selected from the group consisting of Factor XA, Enterokinase, genenase, sortase, precission protease, thrombin, TEV protease, and elastase 1; or
(e) comprises an amino acid sequence selected from the group consisting of Ile-Glu/Asp-Gly-Arg (SEQ ID NO: 56), Asp-Asp-Asp-Asp-Lys (SEQ ID NO: 57), Pro-Gly-Ala-Ala-His-Tyr (SEQ ID NO: 58), Leu-Pro-X-Thr-Gly/Ala consensus motif (SEQ ID NO: 59), Leu-Glu-Val-Phe-Gln-Gly-Pro (SEQ ID NO: 60), Leu-Val-Pro-Arg-Gly-Ser (SEQ ID NO: 61), Glu-Asn-Leu-Tyr-Phe-Gln-Gly (SEQ ID NO: 62), and [Ala/Gly/Ser/Val]-X (X can be any amino acid; SEQ ID NO: 63).

100-187. (canceled)

188. The fusion polypeptide of claim 1, wherein the heterologous polypeptide;
(a) is chosen from a cytoplasmic and/or nuclear polypeptide, or a transmembrane polypeptide, or a heterologous polypeptide in Table 2;
(b) is cytoplasmic and/or nuclear polypeptide is selected from the group consisting of a component of the apoptosis pathway, a component of a CRISPR/Cas system, a transcription factor, Tet methylcytosine dioxygenase 2 (TET2), FKBP, and Tau;
(c) is a transmembrane polypeptide is selected from the group consisting of CD62L, CCR1, CCR2, CCR5, CCR7, CCR10, CXCR2, CXCR3, CXCR4, CXCR6, CTLA4, PD1, BTLA, VISTA, CD137L, CD80, CD86, TIGIT, CD3, CD8, CD19, CD22, CD20, BCMA, and a chimeric antigen receptor (CAR); or
(d) is selected from the group consisting of a chimeric antigen receptor (CAR), a component of a CRISPR/Cas system, CD8, CD19, and CD22.

189-208. (canceled)

209. A nucleic acid molecule encoding the fusion polypeptide of claim 1.

210. A vector comprising the nucleic acid molecule of claim 209.

211-212. (canceled)

213. A viral particle comprising the vector of claim 210.

214. A cell comprising the fusion polypeptide of claim 1.

215-232. (canceled)

233. A pharmaceutical composition comprising the fusion polypeptide of claim 1, and a pharmaceutically acceptable carrier, excipient or stabilizer.

234. A method of making a cell, said method comprising providing a cell with a nucleic acid molecule encoding the fusion polypeptide of claim 1.

235. A method of degrading a fusion polypeptide, comprising contacting the fusion polypeptide of claim 1 or a cell comprising said fusion polypeptide with COF1, wherein in the presence of COF1, the expression level of said fusion polypeptide is substantially decreased by at least about 1, 2, 3, 4, 5, 6, 7, 8, 9, 10, 20, 30, 40, 50, 60, 70, 80, 90, or 100 percent, relative to the expression level of said fusion polypeptide in the absence of COF1.

236-237. (canceled)

238. A method of regulating the expression of a fusion polypeptide, comprising:
i) contacting the fusion polypeptide of claim 80 or a cell comprising said fusion polypeptide with a stabilization compound, optionally wherein in the presence of the stabilization compound:
a) the degradation domain assumes a conformation more resistant to cellular degradation relative to a conformation in the absence of the stabilization compound;
b) the conformation of the fusion polypeptide is more permissive to cleavage at the heterologous protease cleavage site relative to a conformation in the absence of the stabilization compound; or
c) the expression level of the fusion polypeptide is increased by at least 1.5-, 2-, 3-, 4-, 5-, 10-, 20-, 30-, 40-, or 50-fold, compared to the expression level of the fusion polypeptide in the absence of the stabilization compound.

239-248. (canceled)

249. A method of making a cell, comprising:
i) providing a cell comprising a nucleic acid molecule encoding a fusion polypeptide comprising a compound of formula 1 (COF1)/CRBN-binding polypeptide and a chimeric antigen receptor (CAR), optionally wherein the CAR comprises, in a N-terminal to C-terminal direction, an antigen binding domain, a transmembrane domain, and one or more intracellular signaling domains; and
ii) contacting the cell ex vivo with COF1, optionally wherein:
in the presence of COF1, the expression level of the fusion polypeptide is substantially decreased by at least about 1, 2, 3, 4, 5, 6, 7, 8, 9, 10, 20, 30, 40, 50, 60, 70, 80, 90, or 100 percent, relative to the expression level of the fusion polypeptide in the absence of COF1, wherein the compound of Formula (I) is: [chemical structure]
or a pharmaceutically acceptable salt, ester, hydrate, solvate, or tautomer thereof, wherein:
X is O or S;
R¹ is C₁-C₆ alkyl, C₂-C₆ alkenyl, C₂-C₆ alkynyl, C₁-C₆ heteroalkyl, carbocyclyl, heterocyclyl, aryl, or heteroaryl, each of which is independently and optionally substituted by one or more R⁴;
each of R^{2a} and R^{2b} is independently hydrogen or C₁-C₆ alkyl; or R^{2a} and R^{2b} together with the carbon atom to which they are attached form a carbonyl group or a thiocarbonyl group;
each of R³ is independently C₁-C₆ alkyl, C₂-C₆ alkenyl, C₂-C₆ alkynyl, C₁-C₆ heteroalkyl, halo, cyano, —C(O)R^{A}, —C(O)OR^{B}, —OR^{B}, —N(R^{C})(R^{D}), —C(O)N(R^{C})(R^{D}), —N(R^{C})C(O)R^{A}, —S(O)_{X}R^{E}, —S(O)ₓN(R^{C})(R^{D}), or —N(R^{C})S(O)ₓR^{E}, wherein each alkyl, alkenyl, alkynyl, and heteroalkyl is independently and optionally substituted with one or more R⁶;
each R⁴ is independently C₁-C₆ alkyl, C₂-C₆ alkenyl, C₂-C₆ alkynyl, C₁-C₆ heteroalkyl, halo, cyano, oxo, —C(O)R^{A}, —C(O)OR^{B}, —OR^{B}, —N(R^{C})(R^{D}), —C(O)N(R^{C})(R^{D}), —N(R^{C})C(O)R^{A}, —S(O)_{X}R^{E}, —S(O)ₓN(R^{C})(R^{D}), —N(R^{C})S(O)_{X}R^{E}, carbocyclyl, heterocyclyl, aryl, or heteroaryl, wherein each alkyl, alkenyl, alkynyl, heteroalkyl, carbocyclyl, heterocyclyl, aryl, and heteroaryl is independently and optionally substituted with one or more R⁷;
each of R^{A}, R^{B}, R^{C}, R^{D}, and R^{E} is independently hydrogen or C₁-C₆ alkyl;
each R⁶ is independently C₁-C₆ alkyl, oxo, cyano, —OR^{B}, —N(R^{C})(R^{D}), —C(O)N(R^{C})(R^{D}), —N(R^{C})C(O)R^{A}, aryl, or heteroaryl, wherein each aryl and heteroaryl is independently and optionally substituted with one or more R⁸;
each R⁷ is independently halo, oxo, cyano, —OR^{B}, —N(R^{C})(R^{D}), —C(O)N(R^{C})(R^{D}), or —N(R^{C})C(O)R^{A};
each R⁸ is independently C₁-C₆ alkyl, cyano, —OR^{B}, —N(R^{C})(R^{D}), —C(O)N(R^{C})(R^{D}), or —N(R^{C})C(O)R^{A};
n is 0, 1, 2, 3 or 4; and
x is 0, 1, or 2.

250-256. (canceled)

257. A method of treating a subject having a disease associated with expression of a tumor antigen, comprising:
i) administering to the subject an effective amount of a cell comprising the fusion polypeptide of claim 1, wherein the cell is contacted with COF1 ex vivo before administration, wherein:
in the presence of COF1, the expression level of the fusion polypeptide is decreased by at least about 1, 2, 3, 4, 5, 6, 7, 8, 9, 10, 20, 30, 40, 50, 60, 70, 80, 90, or 100 percent, relative to the expression level of the fusion polypeptide before the cell is contacted with COF1 ex vivo, thereby treating the disease.

258-261. (canceled)

262. A method of treating a subject having a disease associated with expression of a tumor antigen, comprising:
i) administering an effective amount of COF1 to the subject, wherein the subject comprises a cell comprising the fusion polypeptide of claim 1, wherein the administration of COF1 decreases by at least about 1, 2, 3, 4, 5, 6, 7, 8, 9, 10, 20, 30, 40, 50, 60, 70, 80, 90, or 100 percent, the expression level of the fusion polypeptide relative to the expression level of the fusion polypeptide before the administration of COF1.

263-293. (canceled)

294. A method of identifying a genetic element associated with a specific biological phenotype, the method comprising the steps of:
(i) modulating the expression of the fusion polypeptide of claim 1 in cells by exposing said cell to COF1 or a pharmaceutically acceptable salt thereof,
(ii) selecting for cells with a phenotype of interest, and
(iii) identifying said fusion polypeptide that induces said phenotype of interest, wherein exposure of said cell to COF1 or a pharmaceutically acceptable salt thereof, decreases by at least about 1, 2, 3, 4, 5, 6, 7, 8, 9, 10, 20, 30, 40, 50, 60, 70, 80, 90, or 100 percent, the expression level of said fusion polypeptide relative to the expression level of said fusion polypeptide prior to exposure to COF1 or a pharmaceutically acceptable salt thereof.

295. (canceled)

296. A fusion polypeptide comprising a compound of Formula (III) (COF3)/CRBN (cereblon)-binding polypeptide and a heterologous polypeptide, wherein the compound of Formula (III) is: [chemical structure]
or a pharmaceutically acceptable salt, ester, hydrate, solvate, or tautomer thereof, wherein:
X₁ is CR₃; [symbol]
is optionally a double bond when X₁ is CR₃ and R₃ is absent;
each R₁ is independently C₁-C₆ alkyl, C₁-C₆ haloalkyl, C₁-C₆ hydroxyalkyl, or halo, or
two R₁ together with the carbon atoms to which they are attached form a 5- or 6-membered heterocyclyl ring, or
two R₁, when on adjacent atoms, together with the atoms to which they are attached form a C₆-C₁₀ aryl or 5- or 6-membered heteroaryl ring comprising 1 to 3 heteroatoms selected from O, N, and S;
R₂ is hydrogen, C₁-C₆ alkyl, —C(O)C₁-C₆ alkyl, —C(O)(CH₂)₀₋₃— C₆-C₁₀ aryl, —C(O)O(CH₂)₀₋₃—C₆-C₁₀aryl, C₆-C₁₀ aryl, or 5- or 6-membered heteroaryl comprising 1 to 3 heteroatoms selected from O, N, and S, C₃-C₈ carbocyclyl, or 5- to 7-heterocyclyl comprising 1 to 3 heteroatoms selected from O, N, and S, wherein the alkyl is optionally substituted with one or more R₄; and the aryl, heteroaryl, carbocyclyl, and heterocyclyl are optionally substituted with one or more R₅, or
R₁ and R₂, when on adjacent atoms, together with the atoms to which they are attached form a 5- or 6-membered heterocyclyl ring;
R₃ is hydrogen, or R₃ is absent when [symbol] is a double bond;
each R₄ is independently selected from —C(O)OR₆, —C(O)NR₆R_{6′}, —NR₆C(O)R₆, halo, —OH, —NH₂, cyano, C₆-C₁₀ aryl, 5- or 6-membered heteroaryl comprising 1 to 4 heteroatoms selected from O, N, and S, C₃-C₈ carbocyclyl, and 5- to 7-membered heterocyclyl ring comprising 1 to 3 heteroatoms selected from O, N, and S, wherein the aryl, heteroaryl, carbocyclyl, and heterocyclyl are optionally substituted with one or more R₇;
each R₅ is independently selected from C₁-C₆ alkyl, C₂-C₆ alkenyl, C₂-C₆ alkynyl, C₁-C₆ alkoxy, C₁-C₆ haloalkyl, C₁-C₆ haloalkoxy, C₁-C₆ hydroxyalkyl, halo, —OH, —NH₂, cyano, C₃-C₇ carbocyclyl, 5- to 7-membered heterocyclyl comprising 1 to 3 heteroatoms selected from O, N, and S, C₆-C₁₀ aryl, and 5- or 6-membered heteroaryl comprising 1 to 3 heteroatoms selected from O, N, and S, or
two R₅, when on adjacent atoms, together with the atoms to which they are attached form a C₆-C₁₀ aryl or 5- or 6-membered heteroaryl comprising 1 to 3 heteroatoms selected from O, N, and S, optionally substituted with one or more R₁₀, or
two R₅, when on adjacent atoms, together with the atoms to which they are attached form a C₅-C₇ carbocyclyl or 5- to 7-membered heterocyclyl comprising 1 to 3 heteroatoms selected from O, N, and S optionally substituted with one or more R₁₀;
R₆ and R_{6′} are each independently hydrogen, C₁-C₆ alkyl, or C₆-C₁₀ aryl;
each R₇ is independently selected from C₁-C₆ alkyl, C₂-C₆ alkenyl, C₂-C₆ alkynyl, C₁-C₆ alkoxy, C₁-C₆ haloalkyl, C₁-C₆ haloalkoxy, —C(O)R⁸, —(CH₂)₀₋₃C(O)OR₈, —C(O)NR₈R₉, —NR₈C(O)R₉, —NR₈C(O)OR₉, —S(O)ₚNR₈R₉, —S(O)ₚR₁₂, (C₁-C₆)hydroxyalkyl, halo, —OH, —O(CH₂)₁₋₃CN, —NH₂, cyano, —O(CH₂)₀₋₃— C₆-C₁₀ aryl, adamantyl, —O(CH₂)₀₋₃-5- or 6-membered heteroaryl comprising 1 to 3 heteroatoms selected from O, N, and S, C₆-C₁₀ aryl, monocyclic or bicyclic 5- to 10-membered heteroaryl comprising 1 to 3 heteroatoms selected from O, N, and S, C₃-C₇ carbocyclyl, and 5- to 7-membered heterocyclyl comprising 1 to 3 heteroatoms selected from O, N, and S, wherein the alkyl is optionally substituted with one or more R₁₁, and the aryl, heteroaryl, and heterocyclyl are optionally substituted with one or more substituents each independently selected from halogen, C₁-C₆ alkyl, C₁-C₆ haloalkyl, and C₁-C₆ alkoxy, or
two R₇ together with the carbon atom to which they are attached form a ═(O), or
two R₇, when on adjacent atoms, together with the atoms to which they are attached form a C₆-C₁₀ aryl or 5- or 6-membered heteroaryl comprising 1 to 3 heteroatoms selected from O, N, and S, optionally substituted with one or more R₁₀, or
two R₇ together with the atoms to which they are attached form a C₅-C₇ carbocyclyl or a 5- to 7-membered heterocyclyl comprising 1 to 3 heteroatoms selected from O, N, and S, optionally substituted with one or more R₁₀;
R⁸ and R₉ are each independently hydrogen or C₁-C₆ alkyl;
each R₁₀ is independently selected from C₁-C₆ alkyl, C₁-C₆ alkoxy, C₁-C₆ haloalkyl, C₁-C₆ haloalkoxy, C₁-C₆ hydroxyalkyl, halo, —OH, —NH₂, and cyano, or
two R₁₀ together with the carbon atom to which they are attached form a ═(O);
each R₁₁ is independently selected from cyano, C₁-C₆ alkoxy, C₆-C₁₀ aryl, and 5- to 7-membered heterocyclyl comprising 1 to 3 heteroatoms selected from O, N, and S, wherein each aryl and heterocyclyl is optionally substituted with one or more substituents each independently selected from C₁-C₆ alkyl, C₁-C₆ alkoxy, C₁-C₆ haloalkyl, C₁-C₆ haloalkoxy, C₁-C₆ hydroxyalkyl, halo, —OH, —NH₂, and cyano;
R₁₂ is C₁-C₆ alkyl, C₁-C₆ haloalkyl, C₆-C₁₀ aryl, or 5- to 7-membered heterocyclyl comprising 1 to 3 heteroatoms selected from O, N, and S;
Rₓ is hydrogen or deuterium;
p is 0, 1, or 2;
n is 0, 1, or 2;
y is 1 or 2, wherein n+y≤3; and
q is 0, 1, 2, 3, or 4.

297-353. (canceled)

The application's sequence listing, which the Patent Office published only in electronic form, follows.

SEQUENCE LISTING (1560 sequences)

SEQ ID NO: 1 - protein, 60 aa, unidentified
  REGION 1..60: note = source = /note="Description of Unknown: IKZF3 sequence"
MHKRSHTGERPFQCNQCGASFTQKGNLLRHIKLHTGEKPFKCHLCNTASAEARHIKAEMG

SEQ ID NO: 2 - protein, 60 aa, unidentified
  REGION 1..60: note = source = /note="Description of Unknown: IKZF3 sequence"
MHRRSHTGERPFQCNQCGASFTQRGNLLRHIRLHTGERPFRCHLCNTASAEARHIRAEMG

SEQ ID NO: 3 - protein, 59 aa, unidentified
  REGION 1..59: note = source = /note="Description of Unknown: IKZF3 sequence"
HKRSHTGERPFQCNQCGASFTQKGNLLRHIKLHTGEKPFKCHLCNTASAEARHIKAEMG

SEQ ID NO: 4 - protein, 59 aa, unidentified
  REGION 1..59: note = source = /note="Description of Unknown: IKZF3 sequence"
HRRSHTGERPFQCNQCGASFTQRGNLLRHIRLHTGERPFRCHLCNTASAEARHIRAEMG

SEQ ID NO: 5 - protein, 45 aa, unidentified
  REGION 1..45: note = source = /note="Description of Unknown: IKZF3 sequence"
HKRSHTGERPFQCNQCGASFTQKGNLLRHIKLHTGEKPFKCHLCN

SEQ ID NO: 6 - protein, 35 aa, unidentified
  REGION 1..35: note = source = /note="Description of Unknown: IKZF3 sequence"
HKRSHTGERPFQCNQCGASFTQKGNLLRHIKLHTG

SEQ ID NO: 7 - protein, 31 aa, unidentified
  REGION 1..31: note = source = /note="Description of Unknown: IKZF3 sequence"
HTGERPFQCNQCGASFTQKGNLLRHIKLHTG

SEQ ID NO: 8 - protein, 23 aa, unidentified
  REGION 1..23: note = source = /note="Description of Unknown: IKZF3 sequence"
TGERPFQCNQCGASFTQKGNLLR

SEQ ID NO: 9 - protein, 26 aa, unidentified
  REGION 1..26: note = source = /note="Description of Unknown: IKZF3 sequence"
PFQCNQCGASFTQKGNLLRHIKLHTG

SEQ ID NO: 10 - protein, 11 aa, unidentified
  REGION 1..11: note = source = /note="Description of Unknown: IKZF3 sequence"
PFQCNQCGASF

SEQ ID NO: 11 - protein, 14 aa, unidentified
  REGION 1..14: note = source = /note="Description of Unknown: IKZF3 sequence"
TASAEARHIKAEMG

SEQ ID NO: 12 - protein, 60 aa, unidentified
  REGION 1..60: note = source = /note="Description of Unknown: IKZF3 sequence"
MHKRSHTGERPFQCNQCGASFTQKGNLLRHIKLHTGEKPFKCHLCNTASAEARHIRAEMG

SEQ ID NO: 13 - protein, 60 aa, unidentified
  REGION 1..60: note = source = /note="Description of Unknown: IKZF3 sequence"
MHKRSHTGERPFQCNQCGASFTQKGNLLRHIKLHTGEKPFKCHLCNTASAEARHISAEMG

SEQ ID NO: 14 - protein, 60 aa, unidentified
  REGION 1..60: note = source = /note="Description of Unknown: IKZF3 sequence"
MHKRSHTGERPFQCNQCGASFTQKGNLLRHIKLHTGEKPFKCHLCNMALEKMALEKMALE

SEQ ID NO: 15 - protein, 50 aa, unidentified
  REGION 1..50: note = source = /note="Description of Unknown: IKZF3 sequence"
MHKRSHTGERPFQCNQCGASFTQKGNLLRHIKLHTGMALEKMALEKMALE

SEQ ID NO: 16 - protein, 46 aa, unidentified
  REGION 1..46: note = source = /note="Description of Unknown: IKZF3 sequence"
MHTGERPFQCNQCGASFTQKGNLLRHIKLHTGMALEKMALEKMALE

SEQ ID NO: 17 - protein, 38 aa, unidentified
  REGION 1..38: note = source = /note="Description of Unknown: IKZF3 sequence"
MTGERPFQCNQCGASFTQKGNLLRMALEKMALEKMALE

SEQ ID NO: 18 - protein, 26 aa, unidentified
  REGION 1..26: note = source = /note="Description of Unknown: IKZF3 sequence"
MPFQCNQCGASFMALEKMALEKMALE

SEQ ID NO: 19 - protein, 509 aa, Homo sapiens
MEDIQTNAELKSTQEQSVPAESAAVLNDYSLTKSHEMENVDSGEGPANEDEDIGDDSMKVKDEYSERDENVLKSEPMGNAEEPEIPYSYSREYNEYENIKLERHVVSFDSSRPTSGKMNCDVCGLSCISFNVLMVHKRSHTGERPFQCNQCGASFTQKGNLLRHIKLHTGEKPFKCHLCNYACQRRDALTGHLRTHSVEKPYKCEFCGRSYKQRSSLEEHKERCRTFLQSTDPGDTASAEARHIKAEMGSERALVLDRLASNVAKRKSSMPQKFIGEKRHCFDVNYNSSYMYEKESELIQTRMMDQAINNAISYLGAEALRPLVQTPPAPTSEMVPVISSMYPIALTRAEMSNGAPQELEKKSIHLPEKSVPSERGLSPNNSGHDSTDTDSNHEERQNHIYQQNHMVLSRARNGMPLLKEVPRSYELLKPPPICPRDSVKVINKEGEVMDVYRCDHCRVLFLDYVMFTIHMGCHGFRDPFECNMCGYRSHDRYEFSSHIARGEHRALLK

SEQ ID NO: 20 - protein, 519 aa, Homo sapiens
MDADEGQDMSQVSGKESPPVSDTPDEGDEPMPIPEDLSTTSGGQQSSKSDRVVASNVKVETQSDEENGRACEMNGEECAEDLRMLDASGEKMNGSHRDQGSSALSGVGGIRLPNGKLKCDICGIICIGPNVLMVHKRSHTGERPFQCNQCGASFTQKGNLLRHIKLHSGEKPFKCHLCNYACRRRDALTGHLRTHSVGKPHKCGYCGRSYKQRSSLEEHKERCHNYLESMGLPGTLYPVIKEETNHSEMAEDLCKIGSERSLVLDRLASNVAKRKSSMPQKFLGDKGLSDTPYDSSASYEKENEMMKSHVMDQAINNAINYLGAESLRPLVQTPPGGSEVVPVISPMYQLHKPLAEGTPRSNHSAQDSAVENLLLLSKAKLVPSEREASPSNSCQDSTDTESNNEEQRSGLIYLTNHIAPHARNGLSLKEEHRAYDLLRAASENSQDALRVVSTSGEQMKVYKCEHCRVLFLDHVMYTIHMGCHGFRDPFECNMCGYHSQDRYEFSSHITRGEHRFHMS

SEQ ID NO: 21 - protein, 526 aa, Homo sapiens [sequence omitted]

SEQ ID NO: 22 - protein, 585 aa, Homo sapiens
MHTPPALPRRFQGGGRVRTPGSHRQGKDNLERDPSGGCVPDFLPQAQDSNHFIMESLFCESSGDSSLEKEFLGAPVGPSVSTPNSQHSSPSRSLSANSIKVEMYSDEESSRLLGPDERLLEKDDSVIVEDSLSEPLGYCDGSGPEPHSPGGIRLPNGKLKCDVCGMVCIGPNVLMVHKRSHTGERPFHCNQCGASFTQKGNLLRHIKLHSGEKPFKCPFCNYACRRRDALTGHLRTHSVSSPTVGKPYKCNYCGRSYKQQSTLEEHKERCHNYLQSLSTEAQALAGQPGDEIRDLEMVPDSMLHSSSERPTFIDRLANSLTKRKRSTPQKFVGEKQMRFSLSDLPYDVNSGGYEKDVELVAHHSLEPGFGSSLAFVGAEHLRPLRLPPTNCISELTPVISSVYTQMQPLPGRLELPGSREAGEGPEDLADGGPLLYRPRGPLTDPGASPSNGCQDSTDTESNHEDRVAGVVSLPQGPPPQPPPTIVVGRHSPAYAKEDPKPQEGLLRGTPGPSKEVLRVVGESGEPVKAFKCEHCRILFLDHVMFTIHMGCHGFRDPFECNICGYHSQDRYEFSSHIVRGEHKVG

SEQ ID NO: 23 - protein, 419 aa, unidentified
  REGION 1..419: note = source = /note="Description of Unknown: IKZF5 sequence"
MGEKKPEPLDFVKDFQEYLTQQTHHVNMISGSVSGDKEAEALQGAGTDGDQNGLDHPSVEVSLDENSGMLVDGFERTFDGKLKCRYCNYASKGTARLIEHIRIHTGEKPHRCHLCPFASAYERHLEAHMRSHTGEKPYKCELCSFRCSDRSNLSHHRRRKHKMVPIKGTRSSLSSKKMWGVLQKKTSNLGYSRRALINLSPPSMVVQKPDYLNDFTHEIPNIQTDSYESMAKTTPTGGLPRDPQELMVDNPLNQLSTLAGQLSSLPPENQNPASPDVVPCPDEKPFMIQQPSTQAVVSAVSASIPQSSSPTSPEPRPSHSQRNYSPVAGPSSEPSAHTSTPSIGNSQPSTPAPALPVQDPQLLHHCQHCDMYFADNILYTIHMGCHGYENPFQCNICGCKCKNKYDFACHFARGQHNQH

SEQ ID NO: 24 - protein, 30 aa, unidentified
  REGION 1..30: note = source = /note="Description of Unknown: IKZF3 sequence"
HTGERPFQCNQCGASFTQKGNLLRHIKLHT

SEQ ID NO: 25-26 - skipped (2 entries)

SEQ ID NO: 27 - protein, 46 aa, unidentified
  REGION 1..46: note = source = /note="Description of Unknown: IKZF3 sequence"
MHKRSHTGERPFHCNQCGASFTQKGNLLRHIKLHTGEKPFKCHLCN

SEQ ID NO: 28 - protein, 16 aa, synthetic construct
  REGION 1..16: note = source = /note="Description of Artificial Sequence: Synthetic peptide"
GGGGSGGGGTGGGGSG

SEQ ID NO: 29 - protein, 486 aa, synthetic construct
  REGION 1..486: note = source = /note="Description of Artificial Sequence: Synthetic polypeptide"
MALPVTALLLPLALLLHAARPEIVMTQSPATLSLSPGERATLSCRASQDISKYLNWYQQKPGQAPRLLIYHTSRLHSGIPARFSGSGSGTDYTLTISSLQPEDFAVYFCQQGNTLPYTFGQGTKLEIKGGGGSGGGGSGGGGSQVQLQESGPGLVKPSETLSLTCTVSGVSLPDYGVSWIRQPPGKGLEWIGVIWGSETTYYQSSLKSRVTISKDNSKNQVSLKLSSVTAADTAVYYCAKHYYYGGSYAMDYWGQGTLVTVSSTTTPAPRPPTPAPTIASQPLSLRPEACRPAAGGAVHTRGLDFACDIYIWAPLAGTCGVLLLSLVITLYCKRGRKKLLYIFKQPFMRPVQTTQEEDGCSCRFPEEEEGGCELRVKFSRSADAPAYQQGQNQLYNELNLGRREEYDVLDKRRGRDPEMGGKPRRKNPQEGLYNELQKDKMAEAYSEIGMKGERRRGKGHDGLYQGLSTATKDTYDALHMQALPPR

SEQ ID NO: 30 - protein, 562 aa, synthetic construct
  REGION 1..562: note = source = /note="Description of Artificial Sequence: Synthetic polypeptide"
MALPVTALLLPLALLLHAARPEIVMTQSPATLSLSPGERATLSCRASQDISKYLNWYQQKPGQAPRLLIYHTSRLHSGIPARFSGSGSGTDYTLTISSLQPEDFAVYFCQQGNTLPYTFGQGTKLEIKGGGGSGGGGSGGGGSQVQLQESGPGLVKPSETLSLTCTVSGVSLPDYGVSWIRQPPGKGLEWIGVIWGSETTYYQSSLKSRVTISKDNSKNQVSLKLSSVTAADTAVYYCAKHYYYGGSYAMDYWGQGTLVTVSSTTTPAPRPPTPAPTIASQPLSLRPEACRPAAGGAVHTRGLDFACDIYIWAPLAGTCGVLLLSLVITLYCKRGRKKLLYIFKQPFMRPVQTTQEEDGCSCRFPEEEEGGCELRVKFSRSADAPAYQQGQNQLYNELNLGRREEYDVLDKRRGRDPEMGGKPRRKNPQEGLYNELQKDKMAEAYSEIGMKGERRRGKGHDGLYQGLSTATKDTYDALHMQALPPRGGGGSGGGGTGGGGSGMHKRSHTGERPFQCNQCGASFTQKGNLLRHIKLHTGEKPFKCHLCNTASAEARHIKAEMG

SEQ ID NO: 31 - protein, 562 aa, synthetic construct
  REGION 1..562: note = source = /note="Description of Artificial Sequence: Synthetic polypeptide"
MALPVTALLLPLALLLHAARPEIVMTQSPATLSLSPGERATLSCRASQDISKYLNWYQQKPGQAPRLLIYHTSRLHSGIPARFSGSGSGTDYTLTISSLQPEDFAVYFCQQGNTLPYTFGQGTKLEIKGGGGSGGGGSGGGGSQVQLQESGPGLVKPSETLSLTCTVSGVSLPDYGVSWIRQPPGKGLEWIGVIWGSETTYYQSSLKSRVTISKDNSKNQVSLKLSSVTAADTAVYYCAKHYYYGGSYAMDYWGQGTLVTVSSTTTPAPRPPTPAPTIASQPLSLRPEACRPAAGGAVHTRGLDFACDIYIWAPLAGTCGVLLLSLVITLYCKRGRKKLLYIFKQPFMRPVQTTQEEDGCSCRFPEEEEGGCELRVKFSRSADAPAYQQGQNQLYNELNLGRREEYDVLDKRRGRDPEMGGKPRRKNPQEGLYNELQKDKMAEAYSEIGMKGERRRGKGHDGLYQGLSTATKDTYDALHMQALPPRGGGGSGGGGTGGGGSGMHRRSHTGERPFQCNQCGASFTQRGNLLRHIRLHTGERPFRCHLCNTASAEARHIRAEMG

SEQ ID NO: 32 - protein, 829 aa, synthetic construct
  REGION 1..829: note = source = /note="Description of Artificial Sequence: Synthetic polypeptide"
MALPVTALLLPLALLLHAARPRSSLALSLTADQMVSALLDAEPPILYSEYDPTRPFSEASMMGLLTNLADRELVHMINWAKRVPGFVDLALHDQVHLLECAWMEILMIGLVWRSMEHPGKLLFAPNLLLDRNQGKCVEGGVEIFDMLLATSSRFRMMNLQGEEFVCLKSIILLNSGVYTFLSSTLKSLEEKDHIHRVLDKITDTLIHLMAKAGLTLQQQHQRLAQLLLILSHIRHMSSKRMEHLYSMKCKNVVPLSDLLLEMLDAHRLGTGAEDPRPSRKRRSLGDVGEIVMTQSPATLSLSPGERATLSCRASQDISKYLNWYQQKPGQAPRLLIYHTSRLHSGIPARFSGSGSGTDYTLTISSLQPEDFAVYFCQQGNTLPYTFGQGTKLEIKGGGGSGGGGSGGGGSQVQLQESGPGLVKPSETLSLTCTVSGVSLPDYGVSWIRQPPGKGLEWIGVIWGSETTYYQSSLKSRVTISKDNSKNQVSLKLSSVTAADTAVYYCAKHYYYGGSYAMDYWGQGTLVTVSSTTTPAPRPPTPAPTIASQPLSLRPEACRPAAGGAVHTRGLDFACDIYIWAPLAGTCGVLLLSLVITLYCKRGRKKLLYIFKQPFMRPVQTTQEEDGCSCRFPEEEEGGCELRVKFSRSADAPAYQQGQNQLYNELNLGRREEYDVLDKRRGRDPEMGGKPRRKNPQEGLYNELQKDKMAEAYSEIGMKGERRRGKGHDGLYQGLSTATKDTYDALHMQALPPRGGGGSGGGGTGGGGSGMHKRSHTGERPFQCNQCGASFTQKGNLLRHIKLHTGEKPFKCHLCNTASAEARHIKAEMG

SEQ ID NO: 33 - protein, 829 aa, synthetic construct
  REGION 1..829: note = source = /note="Description of Artificial Sequence: Synthetic polypeptide"
MALPVTALLLPLALLLHAARPRSSLALSLTADQMVSALLDAEPPILYSEYDPTRPFSEASMMGLLTNLADRELVHMINWAKRVPGFVDLALHDQVHLLECAWMEILMIGLVWRSMEHPGKLLFAPNLLLDRNQGKCVEGGVEIFDMLLATSSRFRMMNLQGEEFVCLKSIILLNSGVYTFLSSTLKSLEEKDHIHRVLDKITDTLIHLMAKAGLTLQQQHQRLAQLLLILSHIRHMSSKRMEHLYSMKCKNVVPLSDLLLEMLDAHRLGTGAEDPRPSRKRRSLGDVGEIVMTQSPATLSLSPGERATLSCRASQDISKYLNWYQQKPGQAPRLLIYHTSRLHSGIPARFSGSGSGTDYTLTISSLQPEDFAVYFCQQGNTLPYTFGQGTKLEIKGGGGSGGGGSGGGGSQVQLQESGPGLVKPSETLSLTCTVSGVSLPDYGVSWIRQPPGKGLEWIGVIWGSETTYYQSSLKSRVTISKDNSKNQVSLKLSSVTAADTAVYYCAKHYYYGGSYAMDYWGQGTLVTVSSTTTPAPRPPTPAPTIASQPLSLRPEACRPAAGGAVHTRGLDFACDIYIWAPLAGTCGVLLLSLVITLYCKRGRKKLLYIFKQPFMRPVQTTQEEDGCSCRFPEEEEGGCELRVKFSRSADAPAYQQGQNQLYNELNLGRREEYDVLDKRRGRDPEMGGKPRRKNPQEGLYNELQKDKMAEAYSEIGMKGERRRGKGHDGLYQGLSTATKDTYDALHMQALPPRGGGGSGGGGTGGGGSGMHRRSHTGERPFQCNQCGASFTQRGNLLRHIRLHTGERPFRCHLCNTASAEARHIRAEMG

SEQ ID NO: 34 - protein, 8 aa, synthetic construct
  REGION 1..8: note = source = /note="Description of Artificial Sequence: Synthetic peptide"
SARNRQKR

SEQ ID NO: 35 - protein, 383 aa, synthetic construct
  REGION 1..383: note = source = /note="Description of Artificial Sequence: Synthetic polypeptide"
MAEPRQEFEVMEDHAGTYGLGDRKDQGGYTMHQDQEGDTDAGLKAEEAGIGDTPSLEDEAAGHVTQARMVSKSKDGTGSDDKKAKGADGKTKIATPRGAAPPGQKGQANATRIPAKTPPAPKTPPSSGEPPKSGDRSGYSSPGSPGTPGSRSRTPSLPTPPTREPKKVAVVRTPPKSPSSAKSRLQTAPVPMPDLKNVKSKIGSTENLKHQPGGGKVQIINKKLDLSNVQSKCGSKDNIKHVPGGGSVQIVYKPVDLSKVTSKCGSLGNIHHKPGGGQVEVKSEKLDFKDRVQSKIGSLDNITHVPGGGNKKIETHKLTFRENAKAKTDHGAEIVYKSPVVSGDTSPRHLSNVSSTGSIDMVDSPQLATLADEVSASLAKQGL

SEQ ID NO: 36 - protein, 383 aa, synthetic construct
  REGION 1..383: note = source = /note="Description of Artificial Sequence: Synthetic polypeptide"
MAEPRQEFEVMEDHAGTYGLGDRKDQGGYTMHQDQEGDTDAGLKAEEAGIGDTPSLEDEAAGHVTQARMVSKSKDGTGSDDKKAKGADGKTKIATPRGAAPPGQKGQANATRIPAKTPPAPKTPPSSGEPPKSGDRSGYSSPGSPGTPGSRSRTPSLPTPPTREPKKVAVVRTPPKSPSSAKSRLQTAPVPMPDLKNVKSKIGSTENLKHQPGGGKVQIINKKLDLSNVQSKCGSKDNIKHVSGGGSVQIVYKPVDLSKVTSKCGSLGNIHHKPGGGQVEVKSEKLDFKDRVQSKIGSLDNITHVPGGGNKKIETHKLTFRENAKAKTDHGAEIVYKSPVVSGDTSPRHLSNVSSTGSIDMVDSPQLATLADEVSASLAKQGL

SEQ ID NO: 37 - protein, 16 aa, synthetic construct
  REGION 1..16: note = source = /note="Description of Artificial Sequence: Synthetic peptide"
SGSETPGTSESATPES

SEQ ID NO: 38 - protein, 33 aa, synthetic construct
  REGION 1..33: note = source = /note="Description of Artificial Sequence: Synthetic polypeptide"
GGGGSGGGGTGGGGGSGGGGTGGGGGSGGGGTG

SEQ ID NO: 39 - protein, 33 aa, synthetic construct
  REGION 1..33: note = source = /note="Description of Artificial Sequence: Synthetic polypeptide"
GGGGSGGGGTGGGGSGGKPIPNPLLGLASTGSG

SEQ ID NO: 40 - protein, 4 aa, Homo sapiens
HKRS

SEQ ID NO: 41 - protein, 45 aa, unidentified
  REGION 1..45: note = source = /note="Description of Unknown: IKZF3 sequence"
HRRSHTGERPFQCNQCGASFTQRGNLLRHIRLHTGERPFRCHLCN

SEQ ID NO: 42 - protein, 35 aa, unidentified
  REGION 1..35: note = source = /note="Description of Unknown: IKZF3 sequence"
HRRSHTGERPFQCNQCGASFTQRGNLLRHIRLHTG

SEQ ID NO: 43 - protein, 14 aa, unidentified
  REGION 1..14: note = source = /note="Description of Unknown: IKZF3 sequence"
TASAEARHIRAEMG

SEQ ID NO: 44 - protein, 245 aa, synthetic construct
  REGION 1..245: note = source = /note="Description of Artificial Sequence: Synthetic polypeptide"
SLALSLTADQMVSALLDAEPPILYSEYDPTRPFSEASMMGLLTNLADRELVHMINWAKRVPGFVDLTLHDQVHLLECAWLEILMIGLVWRSMEHPGKLLFAPNLLLDRNQGKCVEGMVEIFDMLLATSSRFRMMNLQGEEFVCLKSIILLNSGVYTFLSSTLKSLEEKDHIHRVLDKITDTLIHLMAKAGLTLQQQHQRLAQLLLILSHIRHMSNKGMEHLYSMKCKNVVPLYDLLLEMLDAHRL

SEQ ID NO: 45 - DNA, 735 bp, synthetic construct
  misc_feature 1..735: note = source = /note="Description of Artificial Sequence: Synthetic polynucleotide"
  source 1..735: mol_type = other DNA
tcgttggcactttccctgactgccgaccagatggtgtccgcccttctggacgccgagcctccaattctgtactcggagtacgatccgactcgcccgttctccgaagccagcatgatgggcctgttgactaacctggcggaccgcgagttggtgcacatgattaactgggctaagcgggtgccgggcttcgtggacctgactctgcacgaccaagtgcacctcctggaatgcgcctggctggaaatcctcatgatcggcctcgtgtggagatccatggagcatcccggaaagctcctgtttgcacccaacctcctgcttgatcgcaaccagggaaaatgcgtggaagggatggtcgagattttcgacatgctgctcgccacctcttcccggttccggatgatgaatctgcagggagaagagttcgtgtgtctgaagtcaatcatcctgctgaactccggggtctataccttcctgagctcgaccctcaagtcactggaggaaaaagaccacatccatcgcgtgctcgataagatcaccgacacccttatccatctcatggcgaaggctggactgaccctgcaacagcagcaccagaggctggcccagttgctgctgattctgagccacatccggcacatgtcgaacaaggggatggaacacctgtacagcatgaagtgcaagaacgtcgtgcctctgtacgatctgctcctggaaatgctggacgcgcacagactc

SEQ ID NO: 46 - protein, 245 aa, synthetic construct
  REGION 1..245: note = source = /note="Description of Artificial Sequence: Synthetic polypeptide"
SLALSLTADQMVSALLDAEPPILYSEYDPTRPFSEASMMGLLTNLADRELVHMINWAKRVPGFVDLALHDQVHLLECAWMEILMIGLVWRSMEHPGKLLFAPNLLLDRNQGKCVEGGVEIFDMLLATSSRFRMMNLQGEEFVCLKSIILLNSGVYTFLSSTLKSLEEKDHIHRVLDKITDTLIHLMAKAGLTLQQQHQRLAQLLLILSHIRHMSSKRMEHLYSMKCKNVVPLSDLLLEMLDAHRL

SEQ ID NO: 47 - DNA, 735 bp, synthetic construct
  misc_feature 1..735: note = source = /note="Description of Artificial Sequence: Synthetic polynucleotide"
  source 1..735: mol_type = other DNA
tcgttggcactttccctgactgccgaccagatggtgtccgcccttctggacgccgagcctccaattctgtactcggagtacgatccgactcgcccgttctccgaagccagcatgatgggcctgttgactaacctggcggaccgcgagttggtgcacatgattaactgggctaagcgggtgccgggcttcgtggacctggccctgcacgaccaagtgcacctcctggaatgcgcctggatggaaatcctcatgatcggcctcgtgtggagatccatggagcatcccggaaagctcctgtttgcacccaacctcctgcttgatcgcaaccagggaaaatgcgtggaagggggtgtcgagattttcgacatgctgctcgccacctcttcccggttccggatgatgaatctgcagggagaagagttcgtgtgtctgaagtcaatcatcctgctgaactccggggtctataccttcctgagctcgaccctcaagtcactggaggaaaaagaccacatccatcgcgtgctcgataagatcaccgacacccttatccatctcatggcgaaggctggactgaccctgcaacagcagcaccagaggctggcccagttgctgctgattctgagccacatccggcacatgtcgtccaagaggatggaacacctgtacagcatgaagtgcaagaacgtcgtgcctctgtccgatctgctcctggaaatgctggacgcgcacagactc

SEQ ID NO: 48 - protein, 245 aa, synthetic construct
  REGION 1..245: note = source = /note="Description of Artificial Sequence: Synthetic polypeptide"
SLALSLTADQMVSALLDAEPPILYSEYDPTRPFSEASMMGLLTNLADRELVHMINWAKRVPGFVDLTLHDQVHLLECAWMEILMIGLVWRSMEHPGKLLFAPNLLLDRNQGKCVEGGVEIFDMLLATSSRFRMMNLQGEEFVCLKSIILLNSGVYTFLSSTLKSLEEKDHIHRVLDKITDTLIHLMAKAGLTLQQQHQRLAQLLLILSHIRHMSNKRMEHLYSMKCKNVVPLSDLLLEMLDAHRL

SEQ ID NO: 49 - DNA, 735 bp, synthetic construct
  misc_feature 1..735: note = source = /note="Description of Artificial Sequence: Synthetic polynucleotide"
  source 1..735: mol_type = other DNA
tcgttggcactttccctgactgccgaccagatggtgtccgcccttctggacgccgagcctccaattctgtactcggagtacgatccgactcgcccgttctccgaagccagcatgatgggcctgttgactaacctggcggaccgcgagttggtgcacatgattaactgggctaagcgggtgccgggcttcgtggacctgaccctgcacgaccaagtgcacctcctggaatgcgcctggatggaaatcctcatgatcggcctcgtgtggagatccatggagcatcccggaaagctcctgtttgcacccaacctcctgcttgatcgcaaccagggaaaatgcgtggaagggggtgtcgagattttcgacatgctgctcgccacctcttcccggttccggatgatgaatctgcagggagaagagttcgtgtgtctgaagtcaatcatcctgctgaactccggggtctataccttcctgagctcgaccctcaagtcactggaggaaaaagaccacatccatcgcgtgctcgataagatcaccgacacccttatccatctcatggcgaaggctggactgaccctgcaacagcagcaccagaggctggcccagttgctgctgattctgagccacatccggcacatgtcgaacaagaggatggaacacctgtacagcatgaagtgcaagaacgtcgtgcctctgtccgatctgctcctggaaatgctggacgcgcacagactc

SEQ ID NO: 50 - protein, 107 aa, synthetic construct
  REGION 1..107: note = source = /note="Description of Artificial Sequence: Synthetic polypeptide"
GVQVETISPGDGRTFPKRGQTCVVHYTGMLEDGKKVDSSRDRNKPFKFMLGKQEVIRGWEEGVAQMSVGQRAKLTISPDYAYGATGHPGIIPPHATLVFDVELLKPE

SEQ ID NO: 51 - protein, 158 aa, synthetic construct
  REGION 1..158: note = source = /note="Description of Artificial Sequence: Synthetic polypeptide"
ISLIAALAVDYVIGMENAMPWNLPADLAWFKRNTLNKPVIMGRHTWESIGRPLPGRKNIILSSQPSTDDRVTWVKSVDEAIAACGDVPEIMVIGGGRVIEQFLPKAQKLYLTHIDAEVEGDTHFPDYEPDDWESVFSEFHDADAQNSHSYCFEILERR

SEQ ID NO: 52-54 - skipped (3 entries)

SEQ ID NO: 55 - protein, 5 aa, synthetic construct
  MOD_RES 5: note = Any amino acid
  REGION 1..5: note = source = /note="Description of Artificial Sequence: Synthetic peptide"
IEPDX

SEQ ID NO: 56 - protein, 4 aa, unidentified
  VARIANT 2: note = /replace="Asp"
  SITE 1..4: note = /note="Variant residues given in the sequence have no preference with respect to those in the annotations for variant positions"
  REGION 1..4: note = source = /note="Description of Unknown: Factor XA sequence"
IEGR

SEQ ID NO: 57 - protein, 5 aa, unidentified
  REGION 1..5: note = source = /note="Description of Unknown: Enterokinase sequence"
DDDDK

SEQ ID NO: 58 - protein, 6 aa, unidentified
  REGION 1..6: note = source = /note="Description of Unknown: Genenase sequence"
PGAAHY

SEQ ID NO: 59 - protein, 5 aa, synthetic construct
  MOD_RES 3: note = Any amino acid
  VARIANT 5: note = /replace="Ala"
  SITE 1..5: note = /note="Variant residues given in the sequence have no preference with respect to those in the annotations for variant positions"
  REGION 1..5: note = source = /note="Description of Artificial Sequence: Synthetic peptide"
LPXTG

SEQ ID NO: 60 - protein, 7 aa, unidentified
  REGION 1..7: note = source = /note="Description of Unknown: PreScission protease sequence"
LEVFQGP

SEQ ID NO: 61 - protein, 6 aa, unidentified
  REGION 1..6: note = source = /note="Description of Unknown: Thrombin sequence"
LVPRGS

SEQ ID NO: 62 - protein, 7 aa, unidentified
  REGION 1..7: note = source = /note="Description of Unknown: TEV protease sequence"
ENLYFQG

SEQ ID NO: 63 - skipped

SEQ ID NO: 64 - protein, 21 aa, synthetic construct
  REGION 1..21: note = source = /note="Description of Artificial Sequence: Synthetic peptide"
MALPVTALLLPLALLLHAARP

SEQ ID NO: 65 - protein, 22 aa, synthetic construct
  REGION 1..22: note = source = /note="Description of Artificial Sequence: Synthetic peptide"
MLLLVTSLLLCELPHPAFLLIP

SEQ ID NO: 66 - protein, 20 aa, synthetic construct
  REGION 1..20: note = source = /note="Description of Artificial Sequence: Synthetic peptide"
MYRMQLLSCIALSLALVTNS

SEQ ID NO: 67 - protein, 21 aa, synthetic construct
  REGION 1..21: note = source = /note="Description of Artificial Sequence: Synthetic peptide"
MAQVKLQESGTELAKPGAAVK

SEQ ID NO: 68 - protein, 19 aa, synthetic construct
  REGION 1..19: note = source = /note="Description of Artificial Sequence: Synthetic peptide"
MRFLAATFLLLALSTAAQA

SEQ ID NO: 69 - protein, 21 aa, synthetic construct
  REGION 1..21: note = source = /note="Description of Artificial Sequence: Synthetic peptide"
MGLLQLLAFSFLALCRARVRA

SEQ ID NO: 70 - protein, 21 aa, synthetic construct
  REGION 1..21: note = source = /note="Description of Artificial Sequence: Synthetic peptide"
MLLAWVQAFLVSNMLLAEAYG

SEQ ID NO: 71 - protein, 21 aa, synthetic construct
  REGION 1..21: note = source = /note="Description of Artificial Sequence: Synthetic peptide"
MKFQGPLACLLLALCLGSGEA

SEQ ID NO: 72 - protein, 22 aa, synthetic construct
  REGION 1..22: note = source = /note="Description of Artificial Sequence: Synthetic peptide"
MDAMKRGLCCVLLLCGAVFVSP

SEQ ID NO: 73 - protein, 35 aa, synthetic construct
  REGION 1..35: note = source = /note="Description of Artificial Sequence: Synthetic polypeptide"
MGTVSSRRSWWPLPLLLLLLLLLGPAGARAQEDED

SEQ ID NO: 74 - protein, 4 aa, synthetic construct
  REGION 1..4: note = source = /note="Description of Artificial Sequence: Synthetic peptide"
KDEL

SEQ ID NO: 75-76 - skipped (2 entries)

SEQ ID NO: 77 - protein, 46 aa, unidentified
  REGION 1..46: note = source = /note="Description of Unknown: IKZF3 sequence"
MHKRSHTGERPFQCNQCGASFTQKGNLLRHIKLHTGEKPFKCHLCN

SEQ ID NO: 78 - protein, 36 aa, unidentified
  REGION 1..36: note = source = /note="Description of Unknown: IKZF3 sequence"
MHKRSHTGERPFQCNQCGASFTQKGNLLRHIKLHTG

SEQ ID NO: 79 - protein, 32 aa, unidentified
  REGION 1..32: note = source = /note="Description of Unknown: IKZF3 sequence"
MHTGERPFQCNQCGASFTQKGNLLRHIKLHTG

SEQ ID NO: 80 - protein, 31 aa, unidentified
  REGION 1..31: note = source = /note="Description of Unknown: IKZF3 sequence"
MHTGERPFQCNQCGASFTQKGNLLRHIKLHT

SEQ ID NO: 81 - protein, 24 aa, unidentified
  REGION 1..24: note = source = /note="Description of Unknown: IKZF3 sequence"
MTGERPFQCNQCGASFTQKGNLLR

SEQ ID NO: 82 - protein, 27 aa, unidentified
  REGION 1..27: note = source = /note="Description of Unknown: IKZF3 sequence"
MPFQCNQCGASFTQKGNLLRHIKLHTG

SEQ ID NO: 83 - protein, 12 aa, unidentified
  REGION 1..12: note = source = /note="Description of Unknown: IKZF3 sequence"
MPFQCNQCGASF

SEQ ID NO: 84 - protein, 59 aa, unidentified
  REGION 1..59: note = source = /note="Description of Unknown: IKZF3 sequence"
HKRSHTGERPFQCNQCGASFTQKGNLLRHIKLHTGEKPFKCHLCNTASAEARHIRAEMG

SEQ ID NO: 85 - protein, 59 aa, unidentified
  REGION 1..59: note = source = /note="Description of Unknown: IKZF3 sequence"
HKRSHTGERPFQCNQCGASFTQKGNLLRHIKLHTGEKPFKCHLCNMALEKMALEKMALE

SEQ ID NO: 86 - protein, 49 aa, unidentified
  REGION 1..49: note = source = /note="Description of Unknown: IKZF3 sequence"
HKRSHTGERPFQCNQCGASFTQKGNLLRHIKLHTGMALEKMALEKMALE

SEQ ID NO: 87 - protein, 45 aa, unidentified
  REGION 1..45: note = source = /note="Description of Unknown: IKZF3 sequence"
HTGERPFQCNQCGASFTQKGNLLRHIKLHTGMALEKMALEKMALE

SEQ ID NO: 88 - protein, 37 aa, unidentified
  REGION 1..37: note = source = /note="Description of Unknown: IKZF3 sequence"
TGERPFQCNQCGASFTQKGNLLRMALEKMALEKMALE

SEQ ID NO: 89 - protein, 25 aa, unidentified
  REGION 1..25: note = source = /note="Description of Unknown: IKZF3 sequence"
PFQCNQCGASFMALEKMALEKMALE

SEQ ID NO: 90 - protein, 45 aa, unidentified
  REGION 1..45: note = source = /note="Description of Unknown: IKZF3 sequence"
HKRSHTGERPFHCNQCGASFTQKGNLLRHIKLHTGEKPFKCHLCN

SEQ ID NO: 91 - protein, 14 aa, unidentified
  REGION 1..14: note = source = /note="Description of Unknown: IKZF3 sequence"
MALEKMALEKMALE

SEQ ID NO: 92 - protein, 753 aa, synthetic construct
  REGION 1..753: note = source = /note="Description of Artificial Sequence: Synthetic polypeptide"
MALPVTALLLPLALLLHAARPRSSLALSLTADQMVSALLDAEPPILYSEYDPTRPFSEASMMGLLTNLADRELVHMINWAKRVPGFVDLALHDQVHLLECAWMEILMIGLVWRSMEHPGKLLFAPNLLLDRNQGKCVEGGVEIFDMLLATSSRFRMMNLQGEEFVCLKSIILLNSGVYTFLSSTLKSLEEKDHIHRVLDKITDTLIHLMAKAGLTLQQQHQRLAQLLLILSHIRHMSSKRMEHLYSMKCKNVVPLSDLLLEMLDAHRLGTGAEDPRPSRKRRSLGDVGEIVMTQSPATLSLSPGERATLSCRASQDISKYLNWYQQKPGQAPRLLIYHTSRLHSGIPARFSGSGSGTDYTLTISSLQPEDFAVYFCQQGNTLPYTFGQGTKLEIKGGGGSGGGGSGGGGSQVQLQESGPGLVKPSETLSLTCTVSGVSLPDYGVSWIRQPPGKGLEWIGVIWGSETTYYQSSLKSRVTISKDNSKNQVSLKLSSVTAADTAVYYCAKHYYYGGSYAMDYWGQGTLVTVSSTTTPAPRPPTPAPTIASQPLSLRPEACRPAAGGAVHTRGLDFACDIYIWAPLAGTCGVLLLSLVITLYCKRGRKKLLYIFKQPFMRPVQTTQEEDGCSCRFPEEEEGGCELRVKFSRSADAPAYQQGQNQLYNELNLGRREEYDVLDKRRGRDPEMGGKPRRKNPQEGLYNELQKDKMAEAYSEIGMKGERRRGKGHDGLYQGLSTATKDTYDALHMQALPPR

SEQ ID NO: 93 - protein, 843 aa, synthetic construct
  REGION 1..843: note = source = /note="Description of Artificial Sequence: Synthetic polypeptide"
MALPVTALLLPLALLLHAARPRSSLALSLTADQMVSALLDAEPPILYSEYDPTRPFSEASMMGLLTNLADRELVHMINWAKRVPGFVDLALHDQVHLLECAWMEILMIGLVWRSMEHPGKLLFAPNLLLDRNQGKCVEGGVEIFDMLLATSSRFRMMNLQGEEFVCLKSIILLNSGVYTFLSSTLKSLEEKDHIHRVLDKITDTLIHLMAKAGLTLQQQHQRLAQLLLILSHIRHMSSKRMEHLYSMKCKNVVPLSDLLLEMLDAHRLGTGAEDPRPSRKRRSLGDVGEIVMTQSPATLSLSPGERATLSCRASQDISKYLNWYQQKPGQAPRLLIYHTSRLHSGIPARFSGSGSGTDYTLTISSLQPEDFAVYFCQQGNTLPYTFGQGTKLEIKGGGGSGGGGSGGGGSQVQLQESGPGLVKPSETLSLTCTVSGVSLPDYGVSWIRQPPGKGLEWIGVIWGSETTYYQSSLKSRVTISKDNSKNQVSLKLSSVTAADTAVYYCAKHYYYGGSYAMDYWGQGTLVTVSSTTTPAPRPPTPAPTIASQPLSLRPEACRPAAGGAVHTRGLDFACDIYIWAPLAGTCGVLLLSLVITLYCKRGRKKLLYIFKQPFMRPVQTTQEEDGCSCRFPEEEEGGCELRVKFSRSADAPAYQQGQNQLYNELNLGRREEYDVLDKRRGRDPEMGGKPRRKNPQEGLYNELQKDKMAEAYSEIGMKGERRRGKGHDGLYQGLSTATKDTYDALHMQALPPRGGGGSGGGGTGGGGSGMHKRSHTGERPFQCNQCGASFTQKGNLLRHIKLHTGEKPFKCHLCNTASAEARHIKAEMGGKPIPNPLLGLDST

SEQ ID NO: 94 - protein, 576 aa, synthetic construct
  REGION 1..576: note = source = /note="Description of Artificial Sequence: Synthetic polypeptide"
MALPVTALLLPLALLLHAARPEIVMTQSPATLSLSPGERATLSCRASQDISKYLNWYQQKPGQAPRLLIYHTSRLHSGIPARFSGSGSGTDYTLTISSLQPEDFAVYFCQQGNTLPYTFGQGTKLEIKGGGGSGGGGSGGGGSQVQLQESGPGLVKPSETLSLTCTVSGVSLPDYGVSWIRQPPGKGLEWIGVIWGSETTYYQSSLKSRVTISKDNSKNQVSLKLSSVTAADTAVYYCAKHYYYGGSYAMDYWGQGTLVTVSSTTTPAPRPPTPAPTIASQPLSLRPEACRPAAGGAVHTRGLDFACDIYIWAPLAGTCGVLLLSLVITLYCKRGRKKLLYIFKQPFMRPVQTTQEEDGCSCRFPEEEEGGCELRVKFSRSADAPAYQQGQNQLYNELNLGRREEYDVLDKRRGRDPEMGGKPRRKNPQEGLYNELQKDKMAEAYSEIGMKGERRRGKGHDGLYQGLSTATKDTYDALHMQALPPRGGGGSGGGGTGGGGSGMHKRSHTGERPFQCNQCGASFTQKGNLLRHIKLHTGEKPFKCHLCNTASAEARHIKAEMGGKPIPNPLLGLDST

SEQ ID NO: 95 - protein, 560 aa, synthetic construct
  REGION 1..560: note = source = /note="Description of Artificial Sequence: Synthetic polypeptide"
MALPVTALLLPLALLLHAARPEIVMTQSPATLSLSPGERATLSCRASQDISKYLNWYQQKPGQAPRLLIYHTSRLHSGIPARFSGSGSGTDYTLTISSLQPEDFAVYFCQQGNTLPYTFGQGTKLEIKGGGGSGGGGSGGGGSQVQLQESGPGLVKPSETLSLTCTVSGVSLPDYGVSWIRQPPGKGLEWIGVIWGSETTYYQSSLKSRVTISKDNSKNQVSLKLSSVTAADTAVYYCAKHYYYGGSYAMDYWGQGTLVTVSSTTTPAPRPPTPAPTIASQPLSLRPEACRPAAGGAVHTRGLDFACDIYIWAPLAGTCGVLLLSLVITLYCKRGRKKLLYIFKQPFMRPVQTTQEEDGCSCRFPEEEEGGCELRVKFSRSADAPAYQQGQNQLYNELNLGRREEYDVLDKRRGRDPEMGGKPRRKNPQEGLYNELQKDKMAEAYSEIGMKGERRRGKGHDGLYQGLSTATKDTYDALHMQALPPRMHKRSHTGERPFQCNQCGASFTQKGNLLRHIKLHTGEKPFKCHLCNTASAEARHIKAEMGGKPIPNPLLGLDST

SEQ ID NO: 96 - protein, 576 aa, synthetic construct
  REGION 1..576: note = source = /note="Description of Artificial Sequence: Synthetic polypeptide"
MALPVTALLLPLALLLHAARPEIVMTQSPATLSLSPGERATLSCRASQDISKYLNWYQQKPGQAPRLLIYHTSRLHSGIPARFSGSGSGTDYTLTISSLQPEDFAVYFCQQGNTLPYTFGQGTKLEIKGGGGSGGGGSGGGGSQVQLQESGPGLVKPSETLSLTCTVSGVSLPDYGVSWIRQPPGKGLEWIGVIWGSETTYYQSSLKSRVTISKDNSKNQVSLKLSSVTAADTAVYYCAKHYYYGGSYAMDYWGQGTLVTVSSTTTPAPRPPTPAPTIASQPLSLRPEACRPAAGGAVHTRGLDFACDIYIWAPLAGTCGVLLLSLVITLYCKRGRKKLLYIFKQPFMRPVQTTQEEDGCSCRFPEEEEGGCELRVKFSRSADAPAYQQGQNQLYNELNLGRREEYDVLDKRRGRDPEMGGKPRRKNPQEGLYNELQKDKMAEAYSEIGMKGERRRGKGHDGLYQGLSTATKDTYDALHMQALPPRKGGGSKGGGTKGGGSKMHKRSHTGERPFQCNQCGASFTQKGNLLRHIKLHTGEKPFKCHLCNTASAEARHIKAEMGGKPIPNPLLGLDST

SEQ ID NO: 97 - protein, 570 aa, synthetic construct
  REGION 1..570: note = source = /note="Description of Artificial Sequence: Synthetic polypeptide"
MALPVTALLLPLALLLHAARPRSSLAHKRSHTGERPFQCNQCGASFTQKGNLLRHIKLHTGEKPFKCHLCNTASAEARHIKAEMGGTGAEDPRPSRKRRSLGDVGEIVMTQSPATLSLSPGERATLSCRASQDISKYLNWYQQKPGQAPRLLIYHTSRLHSGIPARFSGSGSGTDYTLTISSLQPEDFAVYFCQQGNTLPYTFGQGTKLEIKGGGGSGGGGSGGGGSQVQLQESGPGLVKPSETLSLTCTVSGVSLPDYGVSWIRQPPGKGLEWIGVIWGSETTYYQSSLKSRVTISKDNSKNQVSLKLSSVTAADTAVYYCAKHYYYGGSYAMDYWGQGTLVTVSSTTTPAPRPPTPAPTIASQPLSLRPEACRPAAGGAVHTRGLDFACDIYIWAPLAGTCGVLLLSLVITLYCKRGRKKLLYIFKQPFMRPVQTTQEEDGCSCRFPEEEEGGCELRVKFSRSADAPAYQQGQNQLYNELNLGRREEYDVLDKRRGRDPEMGGKPRRKNPQEGLYNELQKDKMAEAYSEIGMKGERRRGKGHDGLYQGLSTATKDTYDALHMQALPPR

SEQ ID NO: 98 - protein, 565 aa, synthetic construct
  REGION 1..565: note = source = /note="Description of Artificial Sequence: Synthetic polypeptide"
MALPVTALLLPLALLLHAARPHKRSHTGERPFQCNQCGASFTQKGNLLRHIKLHTGEKPFKCHLCNTASAEARHIKAEMGGTGAEDPRPSRKRRSLGDVGEIVMTQSPATLSLSPGERATLSCRASQDISKYLNWYQQKPGQAPRLLIYHTSRLHSGIPARFSGSGSGTDYTLTISSLQPEDFAVYFCQQGNTLPYTFGQGTKLEIKGGGGSGGGGSGGGGSQVQLQESGPGLVKPSETLSLTCTVSGVSLPDYGVSWIRQPPGKGLEWIGVIWGSETTYYQSSLKSRVTISKDNSKNQVSLKLSSVTAADTAVYYCAKHYYYGGSYAMDYWGQGTLVTVSSTTTPAPRPPTPAPTIASQPLSLRPEACRPAAGGAVHTRGLDFACDIYIWAPLAGTCGVLLLSLVITLYCKRGRKKLLYIFKQPFMRPVQTTQEEDGCSCRFPEEEEGGCELRVKFSRSADAPAYQQGQNQLYNELNLGRREEYDVLDKRRGRDPEMGGKPRRKNPQEGLYNELQKDKMAEAYSEIGMKGERRRGKGHDGLYQGLSTATKDTYDALHMQALPPR

SEQ ID NO: 99 - protein, 16 aa, synthetic construct
  REGION 1..16: note = source = /note="Description of Artificial Sequence: Synthetic peptide"
KGGGSKGGGTKGGGSK

SEQ ID NO: 100 - protein, 59 aa, unidentified
  REGION 1..59: note = source = /note="Description of Unknown: IKZF3 sequence"
HKRSHTGERPFQCNQCGASFTQKGNLLRHIKLHTGEKPFKCHLCNTASAEARHISAEMG

SEQ ID NO: 101 - protein, 459 aa, synthetic construct
  REGION 1..459: note = source = /note="Description of Artificial Sequence: Synthetic polypeptide"
MHKRSHTGERPFQCNQCGASFTQKGNLLRHIKLHTGEKPFKCHLCNTASAEARHIKAEMGGGGGSGGGGTGGGGSGMAEPRQEFEVMEDHAGTYGLGDRKDQGGYTMHQDQEGDTDAGLKAEEAGIGDTPSLEDEAAGHVTQARMVSKSKDGTGSDDKKAKGADGKTKIATPRGAAPPGQKGQANATRIPAKTPPAPKTPPSSGEPPKSGDRSGYSSPGSPGTPGSRSRTPSLPTPPTREPKKVAVVRTPPKSPSSAKSRLQTAPVPMPDLKNVKSKIGSTENLKHQPGGGKVQIINKKLDLSNVQSKCGSKDNIKHVPGGGSVQIVYKPVDLSKVTSKCGSLGNIHHKPGGGQVEVKSEKLDFKDRVQSKIGSLDNITHVPGGGNKKIETHKLTFRENAKAKTDHGAEIVYKSPVVSGDTSPRHLSNVSSTGSIDMVDSPQLATLADEVSASLAKQGL

SEQ ID NO: 102 - protein, 715 aa, synthetic construct
  REGION 1..715: note = source = /note="Description of Artificial Sequence: Synthetic polypeptide"
MHKRSHTGERPFQCNQCGASFTQKGNLLRHIKLHTGEKPFKCHLCNTASAEARHIKAEMGGGGGSGGGGTGGGGSGMAEPRQEFEVMEDHAGTYGLGDRKDQGGYTMHQDQEGDTDAGLKAEEAGIGDTPSLEDEAAGHVTQARMVSKSKDGTGSDDKKAKGADGKTKIATPRGAAPPGQKGQANATRIPAKTPPAPKTPPSSGEPPKSGDRSGYSSPGSPGTPGSRSRTPSLPTPPTREPKKVAVVRTPPKSPSSAKSRLQTAPVPMPDLKNVKSKIGSTENLKHQPGGGKVQIINKKLDLSNVQSKCGSKDNIKHVSGGGSVQIVYKPVDLSKVTSKCGSLGNIHHKPGGGQVEVKSEKLDFKDRVQSKIGSLDNITHVPGGGNKKIETHKLTFRENAKAKTDHGAEIVYKSPVVSGDTSPRHLSNVSSTGSIDMVDSPQLATLADEVSASLAKQGLGSSGSETPGTSESATPESVSKGEELFTGVVPILVELDGDVNGHKFSVSGEGEGDATYGKLTLKFICTTGKLPVPWPTLVTTFGYGLQCFARYPDHMKQHDFFKSAMPEGYVQERTIFFKDDGNYKTRAEVKFEGDTLVNRIELKGIDFKEDGNILGHKLEYNYNSHNVYIMADKQKNGIKVNFKIRHNIEDGSVQLADHYQQNTPIGDGPVLLPDNHYLSYQSALSKDPNEKRDHMVLLEFVTAAGITLGMDELYK

SEQ ID NO: 103 - protein, 709 aa, synthetic construct
  REGION 1..709: note = source = /note="Description of Artificial Sequence: Synthetic polypeptide"
MHKRSHTGERPFQCNQCGASFTQKGNLLRHIKLHTGEKPFKCHLCNTASAEARHIKAEMGGGGGSGGGGTGGGGSGMAEPRQEFEVMEDHAGTYGLGDRKDQGGYTMHQDQEGDTDAGLKAEEAGIGDTPSLEDEAAGHVTQARMVSKSKDGTGSDDKKAKGADGKTKIATPRGAAPPGQKGQANATRIPAKTPPAPKTPPSSGEPPKSGDRSGYSSPGSPGTPGSRSRTPSLPTPPTREPKKVAVVRTPPKSPSSAKSRLQTAPVPMPDLKNVKSKIGSTENLKHQPGGGKVQIINKKLDLSNVQSKCGSKDNIKHVPGGGSVQIVYKPVDLSKVTSKCGSLGNIHHKPGGGQVEVKSEKLDFKDRVQSKIGSLDNITHVPGGGNKKIETHKLTFRENAKAKTDHGAEIVYKSPVVSGDTSPRHLSNVSSTGSIDMVDSPQLATLADEVSASLAKQGLGGGGSGGGGTGGGGSGMDFKNLIWLKEVDSTQERLKEWNVSYGTALVADRQTKGRGGLGRKWLSQEGGLYFSFLLNPKEFENLLQLPLVLGLSVSEALEEITEIPFSLKWPNDVYFQEKKVSGVLCELSKDKLIVGIGINVNQREIPEEIKDRATTLYEITGKDWDRKEVLLKVLKRISENLKKFKEKSFKEFKGKIESKMLYLGEEVKLLGEGKITGKLVGLSEKGGALILTEEGIKEILSGEFSLRRS

SEQ ID NO: 104 - protein, 726 aa, synthetic construct
  REGION 1..726: note = source = /note="Description of Artificial Sequence: Synthetic polypeptide"
MHKRSHTGERPFQCNQCGASFTQKGNLLRHIKLHTGEKPFKCHLCNTASAEARHIKAEMGGGGGSGGGGTGGGGSGMAEPRQEFEVMEDHAGTYGLGDRKDQGGYTMHQDQEGDTDAGLKAEEAGIGDTPSLEDEAAGHVTQARMVSKSKDGTGSDDKKAKGADGKTKIATPRGAAPPGQKGQANATRIPAKTPPAPKTPPSSGEPPKSGDRSGYSSPGSPGTPGSRSRTPSLPTPPTREPKKVAVVRTPPKSPSSAKSRLQTAPVPMPDLKNVKSKIGSTENLKHQPGGGKVQIINKKLDLSNVQSKCGSKDNIKHVPGGGSVQIVYKPVDLSKVTSKCGSLGNIHHKPGGGQVEVKSEKLDFKDRVQSKIGSLDNITHVPGGGNKKIETHKLTFRENAKAKTDHGAEIVYKSPVVSGDTSPRHLSNVSSTGSIDMVDSPQLATLADEVSASLAKQGLGGGGSGGGGTGGGGSGGKPIPNPLLGLDSTGSGMDFKNLIWLKEVDSTQERLKEWNVSYGTALVADRQTKGRGGLGRKWLSQEGGLYFSFLLNPKEFENLLQLPLVLGLSVSEALEEITEIPFSLKWPNDVYFQEKKVSGVLCELSKDKLIVGIGINVNQREIPEEIKDRATTLYEITGKDWDRKEVLLKVLKRISENLKKFKEKSFKEFKGKIESKMLYLGEEVKLLGEGKITGKLVGLSEKGGALILTEEGIKEILSGEFSLRRS

SEQ ID NO: 105 - protein, 726 aa, synthetic construct
  REGION 1..726: note = source = /note="Description of Artificial Sequence: Synthetic polypeptide"
MHKRSHTGERPFQCNQCGASFTQKGNLLRHIKLHTGEKPFKCHLCNTASAEARHIKAEMGGGGGSGGGGTGGGGSGMAEPRQEFEVMEDHAGTYGLGDRKDQGGYTMHQDQEGDTDAGLKAEEAGIGDTPSLEDEAAGHVTQARMVSKSKDGTGSDDKKAKGADGKTKIATPRGAAPPGQKGQANATRIPAKTPPAPKTPPSSGEPPKSGDRSGYSSPGSPGTPGSRSRTPSLPTPPTREPKKVAVVRTPPKSPSSAKSRLQTAPVPMPDLKNVKSKIGSTENLKHQPGGGKVQIINKKLDLSNVQSKCGSKDNIKHVPGGGSVQIVYKPVDLSKVTSKCGSLGNIHHKPGGGQVEVKSEKLDFKDRVQSKIGSLDNITHVPGGGNKKIETHKLTFRENAKAKTDHGAEIVYKSPVVSGDTSPRHLSNVSSTGSIDMVDSPQLATLADEVSASLAKQGLGGGGSGGGGTGGGGGSGGGGTGGGGGSGGGGTGMDFKNLIWLKEVDSTQERLKEWNVSYGTALVADRQTKGRGGLGRKWLSQEGGLYFSFLLNPKEFENLLQLPLVLGLSVSEALEEITEIPFSLKWPNDVYFQEKKVSGVLCELSKDKLIVGIGINVNQREIPEEIKDRATTLYEITGKDWDRKEVLLKVLKRISENLKKFKEKSFKEFKGKIESKMLYLGEEVKLLGEGKITGKLVGLSEKGGALILTEEGIKEILSGEFSLRRS

SEQ ID NO: 106 - protein, 709 aa, synthetic construct
  REGION 1..709: note = source = /note="Description of Artificial Sequence: Synthetic polypeptide"
MHKRSHTGERPFQCNQCGASFTQKGNLLRHIKLHTGEKPFKCHLCNTASAEARHIKAEMGGGGGSGGGGTGGGGSGMAEPRQEFEVMEDHAGTYGLGDRKDQGGYTMHQDQEGDTDAGLKAEEAGIGDTPSLEDEAAGHVTQARMVSKSKDGTGSDDKKAKGADGKTKIATPRGAAPPGQKGQANATRIPAKTPPAPKTPPSSGEPPKSGDRSGYSSPGSPGTPGSRSRTPSLPTPPTREPKKVAVVRTPPKSPSSAKSRLQTAPVPMPDLKNVKSKIGSTENLKHQPGGGKVQIINKKLDLSNVQSKCGSKDNIKHVPGGGSVQIVYKPVDLSKVTSKCGSLGNIHHKPGGGQVEVKSEKLDFKDRVQSKIGSLDNITHVPGGGNKKIETHKLTFRENAKAKTDHGAEIVYKSPVVSGDTSPRHLSNVSSTGSIDMVDSPQLATLADEVSASLAKQGLSGSETPGTSESATPESMDFKNLIWLKEVDSTQERLKEWNVSYGTALVADRQTKGRGGLGRKWLSQEGGLYFSFLLNPKEFENLLQLPLVLGLSVSEALEEITEIPFSLKWPNDVYFQEKKVSGVLCELSKDKLIVGIGINVNQREIPEEIKDRATTLYEITGKDWDRKEVLLKVLKRISENLKKFKEKSFKEFKGKIESKMLYLGEEVKLLGEGKITGKLVGLSEKGGALILTEEGIKEILSGEFSLRRS

SEQ ID NO: 107 - protein, 633 aa, synthetic construct
  REGION 1..633: note = source = /note="Description of Artificial Sequence: Synthetic polypeptide"
MAEPRQEFEVMEDHAGTYGLGDRKDQGGYTMHQDQEGDTDAGLKAEEAGIGDTPSLEDEAAGHVTQARMVSKSKDGTGSDDKKAKGADGKTKIATPRGAAPPGQKGQANATRIPAKTPPAPKTPPSSGEPPKSGDRSGYSSPGSPGTPGSRSRTPSLPTPPTREPKKVAVVRTPPKSPSSAKSRLQTAPVPMPDLKNVKSKIGSTENLKHQPGGGKVQIINKKLDLSNVQSKCGSKDNIKHVPGGGSVQIVYKPVDLSKVTSKCGSLGNIHHKPGGGQVEVKSEKLDFKDRVQSKIGSLDNITHVPGGGNKKIETHKLTFRENAKAKTDHGAEIVYKSPVVSGDTSPRHLSNVSSTGSIDMVDSPQLATLADEVSASLAKQGLGGGGSGGGGTGGGGSGMDFKNLIWLKEVDSTQERLKEWNVSYGTALVADRQTKGRGGLGRKWLSQEGGLYFSFLLNPKEFENLLQLPLVLGLSVSEALEEITEIPFSLKWPNDVYFQEKKVSGVLCELSKDKLIVGIGINVNQREIPEEIKDRATTLYEITGKDWDRKEVLLKVLKRISENLKKFKEKSFKEFKGKIESKMLYLGEEVKLLGEGKITGKLVGLSEKGGALILTEEGIKEILSGEFSLRRS

SEQ ID NO: 108 - protein, 650 aa, synthetic construct
  REGION 1..650: note = source = /note="Description of Artificial Sequence: Synthetic polypeptide"
MAEPRQEFEVMEDHAGTYGLGDRKDQGGYTMHQDQEGDTDAGLKAEEAGIGDTPSLEDEAAGHVTQARMVSKSKDGTGSDDKKAKGADGKTKIATPRGAAPPGQKGQANATRIPAKTPPAPKTPPSSGEPPKSGDRSGYSSPGSPGTPGSRSRTPSLPTPPTREPKKVAVVRTPPKSPSSAKSRLQTAPVPMPDLKNVKSKIGSTENLKHQPGGGKVQIINKKLDLSNVQSKCGSKDNIKHVPGGGSVQIVYKPVDLSKVTSKCGSLGNIHHKPGGGQVEVKSEKLDFKDRVQSKIGSLDNITHVPGGGNKKIETHKLTFRENAKAKTDHGAEIVYKSPVVSGDTSPRHLSNVSSTGSIDMVDSPQLATLADEVSASLAKQGLGGGGSGGGGTGGGGSGGKPIPNPLLGLDSTGSGMDFKNLIWLKEVDSTQERLKEWNVSYGTALVADRQTKGRGGLGRKWLSQEGGLYFSFLLNPKEFENLLQLPLVLGLSVSEALEEITEIPFSLKWPNDVYFQEKKVSGVLCELSKDKLIVGIGINVNQREIPEEIKDRATTLYEITGKDWDRKEVLLKVLKRISENLKKFKEKSFKEFKGKIESKMLYLGEEVKLLGEGKITGKLVGLSEKGGALILTEEGIKEILSGEFSLRRS

SEQ ID NO: 109 - protein, 59 aa, synthetic construct
  REGION 1..59: note = source = /note="Description of Artificial Sequence: Synthetic polypeptide"
HKRSHTGERPFHCNQCGASFTQKGNLLRHIKLHSGEKPFKCPFCSAGQVMSHHVPPMED

SEQ ID NO: 110 - DNA, 318 bp, synthetic construct
  misc_feature 1..318: note = source = /note="Description of Artificial Sequence: Synthetic polynucleotide"
  source 1..318: mol_type = other DNA
cagtcagtgggcctcggcggccaagcttggcaatccggtactgttggtgaagccattcaccatgcataaaaggagtcacactggtgaacgccccttccactgtaaccagtgtggagcttcttttactcagaagggcaaccttctgagacacataaagttacactctggagagaagccgttcaaatgtcctttctgtagcgctgggcaggtcatgagtcaccatgtacctcctatggaagatggtggtggcgggagcggaggtggaggcacgggcggtggaggttcggggaacgttatgctggaaatgctagaatataa

SEQ ID NO: 111 - DNA, 1814 bp, synthetic construct
  misc_feature 1..1814: note = source = /note="Description of Artificial Sequence: Synthetic polynucleotide"
  source 1..1814: mol_type = other DNA
ccatttcaggtgtcgtgagcggccgctctagagccgaattcggatccatggccctccctgtcaccgccctgctgcttccgctggctcttctgctccacgccgctcggcccgaaattgtgatgacccagtcacccgccactcttagcctttcacccggtgagcgcgcaaccctgtcttgcagagcctcccaagacatctcaaaataccttaattggtatcaacagaagcccggacaggctcctcgccttctgatctaccacaccagccggctccattctggaatccctgccaggttcagcggtagcggatctgggaccgactacaccctcactatcagctcactgcagccagaggacttcgctgtctatttctgtcagcaagggaacaccctgccctacacctttggacagggcaccaagctcgagattaaaggtggaggtggcagcggaggaggtgggtccggcggtggaggaagccaggtccaactccaagaaagcggaccgggtcttgtgaagccatcagaaactctttcactgacttgtactgtgagcggagtgtctctccccgattacggggtgtcttggatcagacagccaccggggaagggtctggaatggattggagtgatttggggctcagagactacttactaccaatcatccctcaagtctcgcgtcaccatctcaaaggacaactctaagaatcaggtgtcactgaaactgtcatctgtgaccgcagccgacaccgccgtgtactattgcgctaagcattactattatggcgggagctacgcaatggattactggggacagggtactctggtcaccgtgtccagcaccactaccccagcaccgaggccacccaccccggctcctaccatcgcctcccagcctctgtccctgcgtccggaggcatgtagacccgcagctggtggggccgtgcatacccggggtcttgacttcgcctgcgatatctacatttgggcccctctggctggtacttgcggggtcctgctgctttcactcgtgatcactctttactgtaagcgcggtcggaagaagctgctgtacatctttaagcaacccttcatgaggcctgtgcagactactcaagaggaggacggctgttcatgccggttcccagaggaggaggaaggcggctgcgaactgcgcgtgaaattcagccgcagcgcagatgctccagcctaccagcaggggcagaaccagctctacaacgaactcaatcttggtcggagagaggagtacgacgtgctggacaagcggagaggacgggacccagaaatgggcgggaagccgcgcagaaagaatccccaagagggcctgtacaacgagctccaaaaggataagatggcagaagcctatagcgagattggtatgaaaggggaacgcagaagaggcaaaggccacgacggactgtaccagggactcagcaccgccaccaaggacacctatgacgctcttcacatgcaggccctgccgcctcggggtggtggcgggagcggaggtggaggcacgggcggtggaggttcggggcataaaaggagtcacactggtgaacgccccttccactgtaaccagtgtggagcttcttttactcagaagggcaaccttctgagacacataaagttacactctggagagaagccgttcaaatgtcctttctgtagcgctgggcaggtcatgagtcaccatgtacctcctatggaagattaagtcgacgcgtaacccagctttcttgtacaaagtggttgatatccagcacagtggcggcgcgccattccgcccctctccctc

SEQ ID NO: 112 - protein, 561 aa, synthetic construct
  REGION 1..561: note = source = /note="Description of Artificial Sequence: Synthetic polypeptide"
MALPVTALLLPLALLLHAARPEIVMTQSPATLSLSPGERATLSCRASQDISKYLNWYQQKPGQAPRLLIYHTSRLHSGIPARFSGSGSGTDYTLTISSLQPEDFAVYFCQQGNTLPYTFGQGTKLEIKGGGGSGGGGSGGGGSQVQLQESGPGLVKPSETLSLTCTVSGVSLPDYGVSWIRQPPGKGLEWIGVIWGSETTYYQSSLKSRVTISKDNSKNQVSLKLSSVTAADTAVYYCAKHYYYGGSYAMDYWGQGTLVTVSSTTTPAPRPPTPAPTIASQPLSLRPEACRPAAGGAVHTRGLDFACDIYIWAPLAGTCGVLLLSLVITLYCKRGRKKLLYIFKQPFMRPVQTTQEEDGCSCRFPEEEEGGCELRVKFSRSADAPAYQQGQNQLYNELNLGRREEYDVLDKRRGRDPEMGGKPRRKNPQEGLYNELQKDKMAEAYSEIGMKGERRRGKGHDGLYQGLSTATKDTYDALHMQALPPRGGGGSGGGGTGGGGSGHKRSHTGERPFHCNQCGASFTQKGNLLRHIKLHSGEKPFKCPFCSAGQVMSHHVPPMED

SEQ ID NO: 113 - protein, 45 aa, synthetic construct
  REGION 1..45: note = source = /note="Description of Artificial Sequence: Synthetic polypeptide"
HKRSHTGERPFHCNQCGASFTQKGNLLRHIKLHSGEKPFKCPFCS

SEQ ID NO: 114 - protein, 14 aa, synthetic construct
  REGION 1..14: note = source = /note="Description of Artificial Sequence: Synthetic peptide"
AGQVMSHHVPPMED

SEQ ID NO: 115-122 - skipped (8 entries)

SEQ ID NO: 123 - protein, 4 aa, synthetic construct
  REGION 1..4: note = source = /note="Description of Artificial Sequence: Synthetic peptide"
RTKR

SEQ ID NO: 124 - skipped

SEQ ID NO: 125 - protein, 20 aa, synthetic construct
  REGION 1..20: note = source = /note="Description of Artificial Sequence: Synthetic peptide"
GTGAEDPRPSRKRRSLGDVG

SEQ ID NO: 126 - DNA, 60 bp, synthetic construct
  misc_feature 1..60: note = source = /note="Description of Artificial Sequence: Synthetic oligonucleotide"
  source 1..60: mol_type = other DNA
ggaaccggcgcggaagacccccggccctccaggaagcgaaggtccctcggagacgtgggt

SEQ ID NO: 127 - protein, 14 aa, synthetic construct
  REGION 1..14: note = source = /note="Description of Artificial Sequence: Synthetic peptide"
GTGAEDPRPSRKRR

SEQ ID NO: 128 - DNA, 42 bp, synthetic construct
  misc_feature 1..42: note = source = /note="Description of Artificial Sequence: Synthetic oligonucleotide"
  source 1..42: mol_type = other DNA
ggaaccggcgcggaagacccccggccctccaggaagcgaagg

SEQ ID NO: 129 - protein, 15 aa, synthetic construct
  REGION 1..15: note = source = /note="Description of Artificial Sequence: Synthetic peptide"
LQWLEQQVAKRRTKR

SEQ ID NO: 130 - DNA, 45 bp, synthetic construct
  misc_feature 1..45: note = source = /note="Description of Artificial Sequence: Synthetic oligonucleotide"
  source 1..45: mol_type = other DNA
ctgcaatggctggagcagcaggtggcgaagcggagaactaagcgg

SEQ ID NO: 131 - protein, 18 aa, synthetic construct
  REGION 1..18: note = source = /note="Description of Artificial Sequence: Synthetic peptide"
GTGAEDPRPSRKRRSLGG

SEQ ID NO: 132 - DNA, 54 bp, synthetic construct
  misc_feature 1..54: note = source = /note="Description of Artificial Sequence: Synthetic oligonucleotide"
  source 1..54: mol_type = other DNA
ggcacaggtgccgaggaccctcggccaagccgcaaaaggaggtcacttggcggc

SEQ ID NO: 133 - protein, 17 aa, synthetic construct
  REGION 1..17: note = source = /note="Description of Artificial Sequence: Synthetic peptide"
GTGAEDPRPSRKRRSLG

SEQ ID NO: 134 - DNA, 51 bp, synthetic construct
  misc_feature 1..51: note = source = /note="Description of Artificial Sequence: Synthetic oligonucleotide"
  source 1..51: mol_type = other DNA
ggaaccggagcagaagatcccagaccaagccggaaaaggcggtccctgggt

SEQ ID NO: 135 - protein, 14 aa, synthetic construct
  REGION 1..14: note = source = /note="Description of Artificial Sequence: Synthetic peptide"
SLNLTESHNSRKKR

SEQ ID NO: 136 - DNA, 42 bp, synthetic construct
  misc_feature 1..42: note = source = /note="Description of Artificial Sequence: Synthetic oligonucleotide"
  source 1..42: mol_type = other DNA
agtctcaatttgactgagtcacacaattccaggaagaaaagg

SEQ ID NO: 137 - protein, 14 aa, synthetic construct
  REGION 1..14: note = source = /note="Description of Artificial Sequence: Synthetic peptide"
CKINGYPKRGRKRR

SEQ ID NO: 138 - DNA, 42 bp, synthetic construct
  misc_feature 1..42: note = source = /note="Description of Artificial Sequence: Synthetic oligonucleotide"
  source 1..42: mol_type = other DNA
tgcaagatcaacggctaccctaagaggggcagaaagcggcgg

SEQ ID NO: 139 - DNA, 12 bp, synthetic construct
  misc_feature 1..12: note = source = /note="Description of Artificial Sequence: Synthetic oligonucleotide"
  source 1..12: mol_type = other DNA
cgtactaaaaga

SEQ ID NO: 140 - protein, 26 aa, synthetic construct
  REGION 1..26: note = source = /note="Description of Artificial Sequence: Synthetic peptide"
MALPVTALLLPLALLLHAARPRSSLA

SEQ ID NO: 141 - protein, 20 aa, synthetic construct
  REGION 1..20: note = source = /note="Description of Artificial Sequence: Synthetic peptide"
GGGGSGGGGSGGGGSGGGGS

SEQ ID NO: 142 - protein, 15 aa, synthetic construct
  REGION 1..15: note = source = /note="Description of Artificial Sequence: Synthetic peptide"
GGGGSGGGGSGGGGS

SEQ ID NO: 143 - protein, 4 aa, synthetic construct
  REGION 1..4: note = source = /note="Description of Artificial Sequence: Synthetic peptide"
GGGS

SEQ ID NO: 144 - DNA, 1184 bp, synthetic construct
  misc_feature 1..1184: note = source = /note="Description of Artificial Sequence: Synthetic polynucleotide"
  source 1..1184: mol_type = other DNA
cgtgaggctccggtgcccgtcagtgggcagagcgcacatcgcccacagtccccgagaagttggggggaggggtcggcaattgaaccggtgcctagagaaggtggcgcggggtaaactgggaaagtgatgtcgtgtactggctccgcctttttcccgagggtgggggagaaccgtatataagtgcagtagtcgccgtgaacgttctttttcgcaacgggtttgccgccagaacacaggtaagtgccgtgtgtggttcccgcgggcctggcctctttacgggttatggcccttgcgtgccttgaattacttccacctggctgcagtacgtgattcttgatcccgagcttcgggttggaagtgggtgggagagttcgaggccttgcgcttaaggagccccttcgcctcgtgcttgagttgaggcctggcctgggcgctggggccgccgcgtgcgaatctggtggcaccttcgcgcctgtctcgctgctttcgataagtctctagccatttaaaatttttgatgacctgctgcgacgctttttttctggcaagatagtcttgtaaatgcgggccaagatctgcacactggtatttcggtttttggggccgcgggcggcgacggggcccgtgcgtcccagcgcacatgttcggcgaggcggggcctgcgagcgcggccaccgagaatcggacgggggtagtctcaagctggccggcctgctctggtgcctggcctcgcgccgccgtgtatcgccccgccctgggcggcaaggctggcccggtcggcaccagttgcgtgagcggaaagatggccgcttcccggccctgctgcagggagctcaaaatggaggacgcggcgctcgggagagcgggcgggtgagtcacccacacaaaggaaaagggcctttccgtcctcagccgtcgcttcatgtgactccacggagtaccgggcgccgtccaggcacctcgattagttctcgagcttttggagtacgtcgtctttaggttggggggaggggttttatgcgatggagtttccccacactgagtgggtggagactgaagttaggccagcttggcacttgatgtaattctccttggaatttgccctttttgagtttggatcttggttcattctcaagcctcagacagtggttcaaagtttttttcttccatttcaggtgtcgtga

SEQ ID NO: 145 - DNA, 63 bp, synthetic construct
  misc_feature 1..63: note = source = /note="Description of Artificial Sequence: Synthetic oligonucleotide"
  source 1..63: mol_type = other DNA
atggccctgcctgtgacagccctgctgctgcctctggctctgctgctgcatgccgctagaccc

SEQ ID NO: 146 - DNA, 63 bp, synthetic construct
  misc_feature 1..63: note = source = /note="Description of Artificial Sequence: Synthetic oligonucleotide"
  source 1..63: mol_type = other DNA
atggccctccctgtcaccgccctgctgcttccgctggctcttctgctccacgccgctcggccc

SEQ ID NO: 147 - protein, 45 aa, synthetic construct
  REGION 1..45: note = source = /note="Description of Artificial Sequence: Synthetic polypeptide"
TTTPAPRPPTPAPTIASQPLSLRPEACRPAAGGAVHTRGLDFACD

SEQ ID NO: 148 - DNA, 135 bp, synthetic construct
  misc_feature 1..135: note = source = /note="Description of Artificial Sequence: Synthetic polynucleotide"
  source 1..135: mol_type = other DNA
accacgacgccagcgccgcgaccaccaacaccggcgcccaccatcgcgtcgcagcccctgtccctgcgcccagaggcgtgccggccagcggcggggggcgcagtgcacacgagggggctggacttcgcctgtgat

SEQ ID NO: 149 - protein, 230 aa, synthetic construct
  REGION 1..230: note = source = /note="Description of Artificial Sequence: Synthetic polypeptide"
ESKYGPPCPPCPAPEFLGGPSVFLFPPKPKDTLMISRTPEVTCVVVDVSQEDPEVQFNWYVDGVEVHNAKTKPREEQFNSTYRVVSVLTVLHQDWLNGKEYKCKVSNKGLPSSIEKTISKAKGQPREPQVYTLPPSQEEMTKNQVSLTCLVKGFYPSDIAVEWESNGQPENNYKTTPPVLDSDGSFFLYSRLTVDKSRWQEGNVFSCSVMHEALHNHYTQKSLSLSLGKM

SEQ ID NO: 150 - DNA, 690 bp, synthetic construct
  misc_feature 1..690: note = source = /note="Description of Artificial Sequence: Synthetic polynucleotide"
  source 1..690: mol_type = other DNA
gagagcaagtacggccctccctgccccccttgccctgcccccgagttcctgggcggacccagcgtgttcctgttcccccccaagcccaaggacaccctgatgatcagccggacccccgaggtgacctgtgtggtggtggacgtgtcccaggaggaccccgaggtccagttcaactggtacgtggacggcgtggaggtgcacaacgccaagaccaagccccgggaggagcagttcaatagcacctaccgggtggtgtccgtgctgaccgtgctgcaccaggactggctgaacggcaaggaatacaagtgtaaggtgtccaacaagggcctgcccagcagcatcgagaaaaccatcagcaaggccaagggccagcctcgggagccccaggtgtacaccctgccccctagccaagaggagatgaccaagaaccaggtgtccctgacctgcctggtgaagggcttctaccccagcgacatcgccgtggagtgggagagcaacggccagcccgagaacaactacaagaccaccccccctgtgctggacagcgacggcagcttcttcctgtacagccggctgaccgtggacaagagccggtggcaggagggcaacgtctttagctgctccgtgatgcacgaggccctgcacaaccactacacccagaagagcctgagcctgtccctgggcaagatg

SEQ ID NO: 151 - protein, 282 aa, synthetic construct
  REGION 1..282: note = source = /note="Description of Artificial Sequence: Synthetic polypeptide"
RWPESPKAQASSVPTAQPQAEGSLAKATTAPATTRNTGRGGEEKKKEKEKEEQEERETKTPECPSHTQPLGVYLLTPAVQDLWLRDKATFTCFVVGSDLKDAHLTWEVAGKVPTGGVEEGLLERHSNGSQSQHSRLTLPRSLWNAGTSVTCTLNHPSLPPQRLMALREPAAQAPVKLSLNLLASSDPPEAASWLLCEVSGFSPPNILLMWLEDQREVNTSGFAPARPPPQPGSTTFWAWSVLRVPAPPSPQPATYTCVVSHEDSRTLLNASRSLEVSYVTDH

SEQ ID NO: 152 - DNA, 847 bp, synthetic construct
  misc_feature 1..847: note = source = /note="Description of Artificial Sequence: Synthetic polynucleotide"
  source 1..847: mol_type = other DNA
aggtggcccgaaagtcccaaggcccaggcatctagtgttcctactgcacagccccaggcagaaggcagcctagccaaagctactactgcacctgccactacgcgcaatactggccgtggcggggaggagaagaaaaaggagaaagagaaagaagaacaggaagagagggagaccaagacccctgaatgtccatcccatacccagccgctgggcgtctatctcttgactcccgcagtacaggacttgtggcttagagataaggccacctttacatgtttcgtcgtgggctctgacctgaaggatgcccatttgacttgggaggttgccggaaaggtacccacagggggggttgaggaagggttgctggagcgccattccaatggctctcagagccagcactcaagactcacccttccgagatccctgtggaacgccgggacctctgtcacatgtactctaaatcatcctagcctgcccccacagcgtctgatggcccttagagagccagccgcccaggcaccagttaagcttagcctgaatctgctcgccagtagtgatcccccagaggccgccagctggctcttatgcgaagtgtccggctttagcccgcccaacatcttgctcatgtggctggaggaccagcgagaagtgaacaccagcggcttcgctccagcccggcccccaccccagccgggttctaccacattctgggcctggagtgtcttaagggtcccagcaccacctagcccccagccagccacatacacctgtgttgtgtcccatgaagatagcaggaccctgctaaatgcttctaggagtctggaggtttcctacgtgactgaccatt

SEQ ID NO: 153 - protein, 10 aa, synthetic construct
  REGION 1..10: note = source = /note="Description of Artificial Sequence: Synthetic peptide"
GGGGSGGGGS

SEQ ID NO: 154 - DNA, 30 bp, synthetic construct
  misc_feature 1..30: note = source = /note="Description of Artificial Sequence: Synthetic oligonucleotide"
  source 1..30: mol_type = other DNA
ggtggcggaggttctggaggtggaggttcc

SEQ ID NO: 155 - protein, 24 aa, synthetic construct
  REGION 1..24: note = source = /note="Description of Artificial Sequence: Synthetic peptide"
IYIWAPLAGTCGVLLLSLVITLYC

SEQ ID NO: 156 - DNA, 72 bp, synthetic construct
  misc_feature 1..72: note = source = /note="Description of Artificial Sequence: Synthetic oligonucleotide"
  source 1..72: mol_type = other DNA
atctacatctgggcgcccttggccgggacttgtggggtccttctcctgtcactggttatcaccctttactgc

SEQ ID NO: 157 - DNA, 72 bp, synthetic construct
  misc_feature 1..72: note = source = /note="Description of Artificial Sequence: Synthetic oligonucleotide"
  source 1..72: mol_type = other DNA
atctacatttgggcccctctggctggtacttgcggggtcctgctgctttcactcgtgatcactctttactgt

SEQ ID NO: 158 - protein, 42 aa, synthetic construct
  REGION 1..42: note = source = /note="Description of Artificial Sequence: Synthetic polypeptide"
KRGRKKLLYIFKQPFMRPVQTTQEEDGCSCRFPEEEEGGCEL

SEQ ID NO: 159 - DNA, 126 bp, synthetic construct
  misc_feature 1..126: note = source = /note="Description of Artificial Sequence: Synthetic polynucleotide"
  source 1..126: mol_type = other DNA
aaacggggcagaaagaaactcctgtatatattcaaacaaccatttatgagaccagtacaaactactcaagaggaagatggctgtagctgccgatttccagaagaagaagaaggaggatgtgaactg

SEQ ID NO: 160 - DNA, 126 bp, synthetic construct
  misc_feature 1..126: note = source = /note="Description of Artificial Sequence: Synthetic polynucleotide"
  source 1..126: mol_type = other DNA
aagcgcggtcggaagaagctgctgtacatctttaagcaacccttcatgaggcctgtgcagactactcaagaggaggacggctgttcatgccggttcccagaggaggaggaaggcggctgcgaactg

SEQ ID NO: 161 - protein, 48 aa, synthetic construct
  REGION 1..48: note = source = /note="Description of Artificial Sequence: Synthetic polypeptide"
QRRKYRSNKGESPVEPAEPCRYSCPREEEGSTIPIQEDYRKPEPACSP

SEQ ID NO: 162 - DNA, 123 bp, synthetic construct
  misc_feature 1..123: note = source = /note="Description of Artificial Sequence: Synthetic polynucleotide"
  source 1..123: mol_type = other DNA
aggagtaagaggagcaggctcctgcacagtgactacatgaacatgactccccgccgccccgggcccacccgcaagcattaccagccctatgccccaccacgcgacttcgcagcctatcgctcc

SEQ ID NO: 163 - protein, 112 aa, synthetic construct
  REGION 1..112: note = source = /note="Description of Artificial Sequence: Synthetic polypeptide"
RVKFSRSADAPAYKQGQNQLYNELNLGRREEYDVLDKRRGRDPEMGGKPRRKNPQEGLYNELQKDKMAEAYSEIGMKGERRRGKGHDGLYQGLSTATKDTYDALHMQALPPR

SEQ ID NO: 164 - DNA, 336 bp, synthetic construct
  misc_feature 1..336: note = source = /note="Description of Artificial Sequence: Synthetic polynucleotide"
  source 1..336: mol_type = other DNA
agagtgaagttcagcaggagcgcagacgcccccgcgtacaagcagggccagaaccagctctataacgagctcaatctaggacgaagagaggagtacgatgttttggacaagagacgtggccgggaccctgagatggggggaaagccgagaaggaagaaccctcaggaaggcctgtacaatgaactgcagaaagataagatggcggaggcctacagtgagattgggatgaaaggcgagcgccggaggggcaaggggcacgatggcctttaccagggtctcagtacagccaccaaggacacctacgacgcccttcacatgcaggccctgccccctcgc

SEQ ID NO: 165 - DNA, 336 bp, synthetic construct
  misc_feature 1..336: note = source = /note="Description of Artificial Sequence: Synthetic polynucleotide"
  source 1..336: mol_type = other DNA
cgcgtgaaattcagccgcagcgcagatgctccagcctacaagcaggggcagaaccagctctacaacgaactcaatcttggtcggagagaggagtacgacgtgctggacaagcggagaggacgggacccagaaatgggcgggaagccgcgcagaaagaatccccaagagggcctgtacaacgagctccaaaaggataagatggcagaagcctatagcgagattggtatgaaaggggaacgcagaagaggcaaaggccacgacggactgtaccagggactcagcaccgccaccaaggacacctatgacgctcttcacatgcaggccctgccgcctcgg

SEQ ID NO: 166 - protein, 112 aa, synthetic construct
  REGION 1..112: note = source = /note="Description of Artificial Sequence: Synthetic polypeptide"
RVKFSRSADAPAYQQGQNQLYNELNLGRREEYDVLDKRRGRDPEMGGKPRRKNPQEGLYNELQKDKMAEAYSEIGMKGERRRGKGHDGLYQGLSTATKDTYDALHMQALPPR

SEQ ID NO: 167 - DNA, 336 bp, synthetic construct
  misc_feature 1..336: note = source = /note="Description of Artificial Sequence: Synthetic polynucleotide"
  source 1..336: mol_type = other DNA
agagtgaagttcagcaggagcgcagacgcccccgcgtaccagcagggccagaaccagctctataacgagctcaatctaggacgaagagaggagtacgatgttttggacaagagacgtggccgggaccctgagatggggggaaagccgagaaggaagaaccctcaggaaggcctgtacaatgaactgcagaaagataagatggcggaggcctacagtgagattgggatgaaaggcgagcgccggaggggcaaggggcacgatggcctttaccagggtctcagtacagccaccaaggacacctacgacgcccttcacatgcaggccctgccccctcgc

SEQ ID NO: 168 - protein, 5 aa, synthetic construct
  REGION 1..5: note = source = /note="Description of Artificial Sequence: Synthetic peptide"
GGGGS

SEQ ID NO: 169 - protein, 150 aa, synthetic construct [sequence omitted]

SEQ ID NO: 170 - DNA, 450 bp, synthetic construct
  misc_feature 1..450: note = source = /note="Description of Artificial Sequence: Synthetic polynucleotide"
  source 1..450: mol_type = other DNA
cccggatggtttctggactctccggatcgcccgtggaatcccccaaccttctcaccggcactcttggttgtgactgagggcgataatgcgaccttcacgtgctcgttctccaacacctccgaatcattcgtgctgaactggtaccgcatgagcccgtcaaaccagaccgacaagctcgccgcgtttccggaagatcggtcgcaaccgggacaggattgtcggttccgcgtgactcaactgccgaatggcagagacttccacatgagcgtggtccgcgctaggcgaaacgactccgggacctacctgtgcggagccatctcgctggcgcctaaggcccaaatcaaagagagcttgagggccgaactgagagtgaccgagcgcagagctgaggtgccaactgcacatccatccccatcgcctcggcctgcggggcagtttcagaccctggtc

SEQ ID NO: 171 - protein, 394 aa, synthetic construct
  REGION 1..394: note = source = /note="Description of Artificial Sequence: Synthetic polypeptide"
MALPVTALLLPLALLLHAARPPGWFLDSPDRPWNPPTFSPALLVVTEGDNATFTCSFSNTSESFVLNWYRMSPSNQTDKLAAFPEDRSQPGQDCRFRVTQLPNGRDFHMSVVRARRNDSGTYLCGAISLAPKAQIKESLRAELRVTERRAEVPTAHPSPSPRPAGQFQTLVTTTPAPRPPTPAPTIASQPLSLRPEACRPAAGGAVHTRGLDFACDIYIWAPLAGTCGVLLLSLVITLYCKRGRKKLLYIFKQPFMRPVQTTQEEDGCSCRFPEEEEGGCELRVKFSRSADAPAYKQGQNQLYNELNLGRREEYDVLDKRRGRDPEMGGKPRRKNPQEGLYNELQKDKMAEAYSEIGMKGERRRGKGHDGLYQGLSTATKDTYDALHMQALPPR

SEQ ID NO: 172 - DNA, 1182 bp, synthetic construct
  misc_feature 1..1182: note = source = /note="Description of Artificial Sequence: Synthetic polynucleotide"
  source 1..1182: mol_type = other DNA
atggccctccctgtcactgccctgcttctccccctcgcactcctgctccacgccgctagaccacccggatggtttctggactctccggatcgcccgtggaatcccccaaccttctcaccggcactcttggttgtgactgagggcgataatgcgaccttcacgtgctcgttctccaacacctccgaatcattcgtgctgaactggtaccgcatgagcccgtcaaaccagaccgacaagctcgccgcgtttccggaagatcggtcgcaaccgggacaggattgtcggttccgcgtgactcaactgccgaatggcagagacttccacatgagcgtggtccgcgctaggcgaaacgactccgggacctacctgtgcggagccatctcgctggcgcctaaggcccaaatcaaagagagcttgagggccgaactgagagtgaccgagcgcagagctgaggtgccaactgcacatccatccccatcgcctcggcctgcggggcagtttcagaccctggtcacgaccactccggcgccgcgcccaccgactccggccccaactatcgcgagccagcccctgtcgctgaggccggaagcatgccgccctgccgccggaggtgctgtgcatacccggggattggacttcgcatgcgacatctacatttgggctcctctcgccggaacttgtggcgtgctccttctgtccctggtcatcaccctgtactgcaagcggggtcggaaaaagcttctgtacattttcaagcagcccttcatgaggcccgtgcaaaccacccaggaggaggacggttgctcctgccggttccccgaagaggaagaaggaggttgcgagctgcgcgtgaagttctcccggagcgccgacgcccccgcctataagcagggccagaaccagctgtacaacgaactgaacctgggacggcgggaagagtacgatgtgctggacaagcggcgcggccgggaccccgaaatgggcgggaagcctagaagaaagaaccctcaggaaggcctgtataacgagctgcagaaggacaagatggccgaggcctactccgaaattgggatgaagggagagcggcggaggggaaaggggcacgacggcctgtaccaaggactgtccaccgccaccaaggacacatacgatgccctgcacatgcaggcccttccccctcgc

SEQ ID NO: 173 - protein, 40 aa, synthetic construct
  SITE 1..40: note = /note="This sequence may encompass 1-10 'Gly Gly Gly Ser' repeating units"
  REGION 1..40: note = source = /note="Description of Artificial Sequence: Synthetic polypeptide"
GGGSGGGSGGGSGGGSGGGSGGGSGGGSGGGSGGGSGGGS

SEQ ID NO: 174 - DNA, 5000 bp, synthetic construct
  misc_feature 1..5000: note = /note="This sequence may encompass 50-5000 nucleotides"
  misc_feature 1..5000: note = source = /note="Description of Artificial Sequence: Synthetic polynucleotide"
  misc_feature 1..5000: note = source = /note="See specification as filed for detailed description of substitutions and preferred embodiments"
  source 1..5000: mol_type = other DNA
aaaaaaaaaaaaaaaaaaaaaaaaaaaaaaaaaaaaaaaaaaaaaaaaaaaaaaaaaaaaaaaaaaaaaaaaaaaaaaaaaaaaaaaaaaaaaaaaaaaaaaaaaaaaaaaaaaaaaaaaaaaaaaaaaaaaaaaaaaaaaaaaaaaaaaaaaaaaaaaaaaaaaaaaaaaaaaaaaaaaaaaaaaaaaaaaaaaaaaaaaaaaaaaaaaaaaaaaaaaaaaaaaaaaaaaaaaaaaaaaaaaaaaaaaaaaaaaaaaaaaaaaaaaaaaaaaaaaaaaaaaaaaaaaaaaaaaaaaaaaaaaaaaaaaaaaaaaaaaaaaaaaaaaaaaaaaaaaaaaaaaaaaaaaaaaaaaaaaaaaaaaaaaaaaaaaaaaaaaaaaaaaaaaaaaaaaaaaaaaaaaaaaaaaaaaaaaaaaaaaaaaaaaaaaaaaaaaaaaaaaaaaaaaaaaaaaaaaaaaaaaaaaaaaaaaaaaaaaaaaaaaaaaaaaaaaaaaaaaaaaaaaaaaaaaaaaaaaaaaaaaaaaaaaaaaaaaaaaaaaaaaaaaaaaaaaaaaaaaaaaaaaaaaaaaaaaaaaaaaaaaaaaaaaaaaaaaaaaaaaaaaaaaaaaaaaaaaaaaaaaaaaaaaaaaaaaaaaaaaaaaaaaaaaaaaaaaaaaaaaaaaaaaaaaaaaaaaaaaaaaaaaaaaaaaaaaaaaaaaaaaaaaaaaaaaaaaaaaaaaaaaaaaaaaaaaaaaaaaaaaaaaaaaaaaaaaaaaaaaaaaaaaaaaaaaaaaaaaaaaaaaaaaaaaaaaaaaaaaaaaaaaaaaaaaaaaaaaaaaaaaaaaaaaaaaaaaaaaaaaaaaaaaaaaaaaaaaaaaaaaaaaaaaaaaaaaaaaaaaaaaaaaaaaaaaaaaaaaaaaaaaaaaaaaaaaaaaaaaaaaaaaaaaaaaaaaaaaaaaaaaaaaaaaaaaaaaaaaaaaaaaaaaaaaaaaaaaaaaaaaaaaaaaaaaaaaaaaaaaaaaaaaaaaaaaaaaaaaaaaaaaaaaaaaaaaaaaaaaaaaaaaaaaaaaaaaaaaaaaaaaaaaaaaaaaaaaaaaaaaaaaaaaaaaaaaaaaaaaaaaaaaaaaaaaaaaaaaaaaaaaaaaaaaaaaaaaaaaaaaaaaaaaaaaaaaaaaaaaaaaaaaaaaaaaaaaaaaaaaaaaaaaaaaaaaaaaaaaaaaaaaaaaaaaaaaaaaaaaaaaaaaaaaaaaaaaaaaaaaaaaaaaaaaaaaaaaaaaaaaaaaaaaaaaaaaaaaaaaaaaaaaaaaaaaaaaaaaaaaaaaaaaaaaaaaaaaaaaaaaaaaaaaaaaaaaaaaaaaaaaaaaaaaaaaaaaaaaaaaaaaaaaaaaaaaaaaaaaaaaaaaaaaaaaaaaaaaaaaaaaaaaaaaaaaaaaaaaaaaaaaaaaaaaaaaaaaaaaaaaaaaaaaaaaaaaaaaaaaaaaaaaaaaaaaaaaaaaaaaaaaaaaaaaaaaaaaaaaaaaaaaaaaaaaaaaaaaaaaaaaaaaaaaaaaaaaaaaaaaaaaaaaaaaaaaaaaaaaaaaaaaaaaaaaaaaaaaaaaaaaaaaaaaaaaaaaaaaaaaaaaaaaaaaaaaaaaaaaaaaaaaaaaaaaaaaaaaaaaaaaaaaaaaaaaaaaaaaaaaaaaaaaaaaaaaaaaaaaaaaaaaaaaaaaaaaaaaaaaaaaaaaaaaaaaaaaaaaaaaaaaaaaaaaaaaaaaaaaaaaaaaaaaaaaaaaaaaaaaaaaaaaaaaaaaaaaaaaaaaaaaaaaaaaaaaaaaaaaaaaaaaaaaaaaaaaaaaaaaaaaaaaaaaaaaaaaaaaaaaaaaaaaaaaaaaaaaaaaaaaaaaaaaaaaaaaaaaaaaaaaaaaaaaaaaaaaaaaaaaaaaaaaaaaaaaaaaaaaaaaaaaaaaaaaaaaaaaaaaaaaaaaaaaaaaaaaaaaaaaaaaaaaaaaaaaaaaaaaaaaaaaaaaaaaaaaaaaaaaaaaaaaaaaaaaaaaaaaaaaaaaaaaaaaaaaaaaaaaaaaaaaaaaaaaaaaaaaaaaaaaaaaaaaaaaaaaaaaaaaaaaaaaaaaaaaaaaaaaaaaaaaaaaaaaaaaaaaaaaaaaaaaaaaaaaaaaaaaaaaaaaaaaaaaaaaaaaaaaaaaaaaaaaaaaaaaaaaaaaaaaaaaaaaaaaaaaaaaaaaaaaaaaaaaaaaaaaaaaaaaaaaaaaaaaaaaaaaaaaaaaaaaaaaaaaaaaaaaaaaaaaaaaaaaaaaaaaaaaaaaaaaaaaaaaaaaaaaaaaaaaaaaaaaaaaaaaaaaaaaaaaaaaaaaaaaaaaaaaaaaaaaaaaaaaaaaaaaaaaaaaaaaaaaaaaaaaaaaaaaaaaaaaaaaaaaaaaaaaaaaaaaaaaaaaaaaaaaaaaaaaaaaaaaaaaaaaaaaaaaaaaaaaaaaaaaaaaaaaaaaaaaaaaaaaaaaaaaaaaaaaaaaaaaaaaaaaaaaaaaaaaaaaaaaaaaaaaaaaaaaaaaaaaaaaaaaaaaaaaaaaaaaaaaaaaaaaaaaaaaaaaaaaaaaaaaaaaaaaaaaaaaaaaaaaaaaaaaaaaaaaaaaaaaaaaaaaaaaaaaaaaaaaaaaaaaaaaaaaaaaaaaaaaaaaaaaaaaaaaaaaaaaaaaaaaaaaaaaaaaaaaaaaaaaaaaaaaaaaaaaaaaaaaaaaaaaaaaaaaaaaaaaaaaaaaaaaaaaaaaaaaaaaaaaaaaaaaaaaaaaaaaaaaaaaaaaaaaaaaaaaaaaaaaaaaaaaaaaaaaaaaaaaaaaaaaaaaaaaaaaaaaaaaaaaaaaaaaaaaaaaaaaaaaaaaaaaaaaaaaaaaaaaaaaaaaaaaaaaaaaaaaaaaaaaaaaaaaaaaaaaaaaaaaaaaaaaaaaaaaaaaaaaaaaaaaaaaaaaaaaaaaaaaaaaaaaaaaaaaaaaaaaaaaaaaaaaaaaaaaaaaaaaaaaaaaaaaaaaaaaaaaaaaaaaaaaaaaaaaaaaaaaaaaaaaaaaaaaaaaaaaaaaaaaaaaaaaaaaaaaaaaaaaaaaaaaaaaaaaaaaaaaaaaaaaaaaaaaaaaaaaaaaaaaaaaaaaaaaaaaaaaaaaaaaaaaaaaaaaaaaaaaaaaaaaaaaaaaaaaaaaaaaaaaaaaaaaaaaaaaaaaaaaaaaaaaaaaaaaaaaaaaaaaaaaaaaaaaaaaaaaaaaaaaaaaaaaaaaaaaaaaaaaaaaaaaaaaaaaaaaaaaaaaaaaaaaaaaaaaaaaaaaaaaaaaaaaaaaaaaaaaaaaaaaaaaaaaaaaaaaaaaaaaaaaaaaaaaaaaaaaaaaaaaaaaaaaaaaaaaaaaaaaaaaaaaaaaaaaaaaaaaaaaaaaaaaaaaaaaaaaaaaaaaaaaaaaaaaaaaaaaaaaaaaaaaaaaaaaaaaaaaaaaaaaaaaaaaaaaaaaaaaaaaaaaaaaaaaaaaaaaaaaaaaaaaaaaaaaaaaaaaaaaaaaaaaaaaaaaaaaaaaaaaaaaaaaaaaaaaaaaaaaaaaaaaaaaaaaaaaaaaaaaaaaaaaaaaaaaaaaaaaaaaaaaaaaaaaaaaaaaaaaaaaaaaaaaaaaaaaaaaaaaaaaaaaaaaaaaaaaaaaaaaaaaaaaaaaaaaaaaaaaaaaaaaaaaaaaaaaaaaaaaaaaaaaaaaaaaaaaaaaaaaaaaaaaaaaaaaaaaaaaaaaaaaaaaaaaaaaaaaaaaaaaaaaaaaaaaaaaaaaaaaaaaaaaaaaaaaaaaaaaaaaaaaaaaaaaaaaaaaaaaaaaaaaaaaaaaaaaaaaaaaaaaaaaaaaaaaaaaaaaaaaaaaaaaaaaaaaaaaaaaaaaaaaaaaaaaaaaaaaaaaaaaaaaaaaaaaaaaaaaaaaaaaaaaaaaaaaaaaaaaaaaaaaaaaaaaaaaaaaaaaaaaaaaaaaaaaaaaaaaaaaaaaaaaaaaaaaaaaaaaaaaaaaaaaaaaaaaaaaaaaaaaaaaaaaaaaaaaaaaaaaaaaaaaaaaaaaaaaaaaaaaaaaaaaaaaaaaaaaaaaaaaaaaaaaaaaaaaaaaaaaaaaaaaaaaaaaaaaaaaaaaaaaaaaaaaaaaaaaaaaaaaaaaaaaaaaaaaaaaaaaaaaaaaaaaaaaaaaaaaaaaaaaaaaaaaaaaaaaaaaaaaaaaaaaaaaaaaaaaaaaaaaaaaaaaaaaaaaaaaaaaaaaaaaaaaaaaaaaaaaaaaaaaaaaaaaaaaaaaaaaaaaaaaaaaaaaaaaaaaaaaaaaaaaaaaaaaaaaaaaaaaaaaaaaaaaaaaaaaaaaaaaaaaaaaaaaaaaaaaaaaaaaaaaaaaaaaaaaaaaaaaaaaaaaaaaaaaaaaaaaaaaaaaaaaaaaaaaaaaaaaaaaaaaaaaaaaaaaaaaaaaaaaaaaaaaaaaaaaaaaaaaaaaaaaaaaaaaaaaaaaaaaaaaaaaaaaaaaaaaaaaaaaaaaaaaaaaaaaaaaaaaaaaaaaaaaaaaaaaaaaaaaaaaaaaaaaaaaaaaaaaaaaaaaaaaaaaaaaaaaaaaaaaaaaaaaaaaaaaaaaaaaaaaaaaaaaaaaaaaaaaaaaaaaaaaaaaaaaaaaaaaaaaaaaaaaaaaaaaaaaaaaaaaaaaaaaaaaaaaaaaaaaaaaaaaaaaaaaaaaaaaaaaaaaaaaaaaaaaaaaaaaaaaaaaaaaaaaaaaaaaaaaaaaaaaaaaaaaaaaaaaaaaaaaaaaaaaaaaaaaaaaaaaaaaaaaaaaaaaaaaaaaaaaaaaaaaaaaaaaaaaaaaaaaaaaaaaaaaaaaaaaaaaaaaaaaaaaaaaaaaaaaaaaaaaaaaaaaaaaaaaaaaaaaaaaaaaaaaaaaaaaaaaaaaaaaaaaaaaaaaaaaaaaaaaaaaaaaaaaaaaaaaaaaaaaaaaaaaaaaaaaaaaaaaaaaaaaaaaaaaaaaaaaaaaaaaaaaaaaaaaaaaaaaaa

SEQ ID NO: 175 - protein, 373 aa, synthetic construct
  REGION 1..373: note = source = /note="Description of Artificial Sequence: Synthetic polypeptide"
PGWFLDSPDRPWNPPTFSPALLVVTEGDNATFTCSFSNTSESFVLNWYRMSPSNQTDKLAAFPEDRSQPGQDCRFRVTQLPNGRDFHMSVVRARRNDSGTYLCGAISLAPKAQIKESLRAELRVTERRAEVPTAHPSPSPRPAGQFQTLVTTTPAPRPPTPAPTIASQPLSLRPEACRPAAGGAVHTRGLDFACDIYIWAPLAGTCGVLLLSLVITLYCKRGRKKLLYIFKQPFMRPVQTTQEEDGCSCRFPEEEEGGCELRVKFSRSADAPAYKQGQNQLYNELNLGRREEYDVLDKRRGRDPEMGGKPRRKNPQEGLYNELQKDKMAEAYSEIGMKGERRRGKGHDGLYQGLSTATKDTYDALHMQALPPR

SEQ ID NO: 176 - protein, 35 aa, synthetic construct
  REGION 1..35: note = source = /note="Description of Artificial Sequence: Synthetic polypeptide"
TKKKYSSSVHDPNGEYMFMRAVNTAKKSRLTDVTL

SEQ ID NO: 177 - DNA, 105 bp, synthetic construct
  misc_feature 1..105: note = source = /note="Description of Artificial Sequence: Synthetic polynucleotide"
  source 1..105: mol_type = other DNA
acaaaaaagaagtattcatccagtgtgcacgaccctaacggtgaatacatgttcatgagagcagtgaacacagccaaaaaatccagactcacagatgtgacccta

SEQ ID NO: 178 - protein, 69 aa, synthetic construct
  REGION 1..69: note = source = /note="Description of Artificial Sequence: Synthetic polypeptide"
TTTPAPRPPTPAPTIASQPLSLRPEACRPAAGGAVHTRGLDFACDFWLPIGCAAFVVVCILGCILICWL

SEQ ID NO: 179 - DNA, 207 bp, synthetic construct
  misc_feature 1..207: note = source = /note="Description of Artificial Sequence: Synthetic polynucleotide"
  source 1..207: mol_type = other DNA
accacgacgccagcgccgcgaccaccaacaccggcgcccaccatcgcgtcgcagcccctgtccctgcgcccagaggcgtgccggccagcggcggggggcgcagtgcacacgagggggctggacttcgcctgtgatttctggttacccataggatgtgcagcctttgttgtagtctgcattttgggatgcatacttatttgttggctt

SEQ ID NO: 180 - protein, 41 aa, synthetic construct
  REGION 1..41: note = source = /note="Description of Artificial Sequence: Synthetic polypeptide"
RSKRSRLLHSDYMNMTPRRPGPTRKHYQPYAPPRDFAAYRS

SEQ ID NO: 181 - protein, 486 aa, synthetic construct
  REGION 1..486: note = source = /note="Description of Artificial Sequence: Synthetic polypeptide"
MALPVTALLLPLALLLHAARPDIQMTQTTSSLSASLGDRVTISCRASQDISKYLNWYQQKPDGTVKLLIYHTSRLHSGVPSRFSGSGSGTDYSLTISNLEQEDIATYFCQQGNTLPYTFGGGTKLEITGGGGSGGGGSGGGGSEVKLQESGPGLVAPSQSLSVTCTVSGVSLPDYGVSWIRQPPRKGLEWLGVIWGSETTYYNSALKSRLTIIKDNSKSQVFLKMNSLQTDDTAIYYCAKHYYYGGSYAMDYWGQGTSVTVSSTTTPAPRPPTPAPTIASQPLSLRPEACRPAAGGAVHTRGLDFACDIYIWAPLAGTCGVLLLSLVITLYCKRGRKKLLYIFKQPFMRPVQTTQEEDGCSCRFPEEEEGGCELRVKFSRSADAPAYKQGQNQLYNELNLGRREEYDVLDKRRGRDPEMGGKPRRKNPQEGLYNELQKDKMAEAYSEIGMKGERRRGKGHDGLYQGLSTATKDTYDALHMQALPPR

SEQ ID NO: 182 - protein, 465 aa, synthetic construct
  REGION 1..465: note = source = /note="Description of Artificial Sequence: Synthetic polypeptide"
DIQMTQTTSSLSASLGDRVTISCRASQDISKYLNWYQQKPDGTVKLLIYHTSRLHSGVPSRFSGSGSGTDYSLTISNLEQEDIATYFCQQGNTLPYTFGGGTKLEITGGGGSGGGGSGGGGSEVKLQESGPGLVAPSQSLSVTCTVSGVSLPDYGVSWIRQPPRKGLEWLGVIWGSETTYYNSALKSRLTIIKDNSKSQVFLKMNSLQTDDTAIYYCAKHYYYGGSYAMDYWGQGTSVTVSSTTTPAPRPPTPAPTIASQPLSLRPEACRPAAGGAVHTRGLDFACDIYIWAPLAGTCGVLLLSLVITLYCKRGRKKLLYIFKQPFMRPVQTTQEEDGCSCRFPEEEEGGCELRVKFSRSADAPAYKQGQNQLYNELNLGRREEYDVLDKRRGRDPEMGGKPRRKNPQEGLYNELQKDKMAEAYSEIGMKGERRRGKGHDGLYQGLSTATKDTYDALHMQALPPR

SEQ ID NO: 183 - protein, 486 aa, synthetic construct; identical to SEQ ID NO: 181
  REGION 1..486: note = source = /note="Description of Artificial Sequence: Synthetic polypeptide"

SEQ ID NO: 184 - DNA, 1458 bp, synthetic construct
  misc_feature 1..1458: note = source = /note="Description of Artificial Sequence: Synthetic polynucleotide"
  source 1..1458: mol_type = other DNA
atggccttaccagtgaccgccttgctcctgccgctggccttgctgctccacgccgccaggccggacatccagatgacacagactacatcctccctgtctgcctctctgggagacagagtcaccatcagttgcagggcaagtcaggacattagtaaatatttaaattggtatcagcagaaaccagatggaactgttaaactcctgatctaccatacatcaagattacactcaggagtcccatcaaggttcagtggcagtgggtctggaacagattattctctcaccattagcaacctggagcaagaagatattgccacttacttttgccaacagggtaatacgcttccgtacacgttcggaggggggaccaagctggagatcacaggtggcggtggctcgggcggtggtgggtcgggtggcggcggatctgaggtgaaactgcaggagtcaggacctggcctggtggcgccctcacagagcctgtccgtcacatgcactgtctcaggggtctcattacccgactatggtgtaagctggattcgccagcctccacgaaagggtctggagtggctgggagtaatatggggtagtgaaaccacatactataattcagctctcaaatccagactgaccatcatcaaggacaactccaagagccaagttttcttaaaaatgaacagtctgcaaactgatgacacagccatttactactgtgccaaacattattactacggtggtagctatgctatggactactggggccaaggaacctcagtcaccgtctcctcaaccacgacgccagcgccgcgaccaccaacaccggcgcccaccatcgcgtcgcagcccctgtccctgcgcccagaggcgtgccggccagcggcggggggcgcagtgcacacgagggggctggacttcgcctgtgatatctacatctgggcgcccttggccgggacttgtggggtccttctcctgtcactggttatcaccctttactgcaaacggggcagaaagaaactcctgtatatattcaaacaaccatttatgagaccagtacaaactactcaagaggaagatggctgtagctgccgatttccagaagaagaagaaggaggatgtgaactgagagtgaagttcagcaggagcgcagacgcccccgcgtacaagcagggccagaaccagctctataacgagctcaatctaggacgaagagaggagtacgatgttttggacaagagacgtggccgggaccctgagatggggggaaagccgagaaggaagaaccctcaggaaggcctgtacaatgaactgcagaaagataagatggcggaggcctacagtgagattgggatgaaaggcgagcgccggaggggcaaggggcacgatggcctttaccagggtctcagtacagccaccaaggacacctacgacgcccttcacatgcaggccctgccccctcgc

SEQ ID NO: 185 - protein, 242 aa, synthetic construct
  REGION 1..242: note = source = /note="Description of Artificial Sequence: Synthetic polypeptide"
DIQMTQTTSSLSASLGDRVTISCRASQDISKYLNWYQQKPDGTVKLLIYHTSRLHSGVPSRFSGSGSGTDYSLTISNLEQEDIATYFCQQGNTLPYTFGGGTKLEITGGGGSGGGGSGGGGSEVKLQESGPGLVAPSQSLSVTCTVSGVSLPDYGVSWIRQPPRKGLEWLGVIWGSETTYYNSALKSRLTIIKDNSKSQVFLKMNSLQTDDTAIYYCAKHYYYGGSYAMDYWGQGTSVTVSS

SEQ ID NO: 186 - protein, 244 aa, synthetic construct
  REGION 1..244: note = source = /note="Description of Artificial Sequence: Synthetic polypeptide"
QVQLLESGAELVRPGSSVKISCKASGYAFSSYWMNWVKQRPGQGLEWIGQIYPGDGDTNYNGKFKGQATLTADKSSSTAYMQLSGLTSEDSAVYSCARKTISSVVDFYFDYWGQGTTVTGGGSGGGSGGGSGGGSELVLTQSPKFMSTSVGDRVSVTCKASQNVGTNVAWYQQKPGQSPKPLIYSATYRNSGVPDRFTGSGSGTDFTLTITNVQSKDLADYFCQYNRYPYTSFFFTKLEIKRRS

SEQ ID NO: 187 - protein, 464 aa, synthetic construct
  REGION 1..464: note = source = /note="Description of Artificial Sequence: Synthetic polypeptide"
QVQLLESGAELVRPGSSVKISCKASGYAFSSYWMNWVKQRPGQGLEWIGQIYPGDGDTNYNGKFKGQATLTADKSSSTAYMQLSGLTSEDSAVYSCARKTISSVVDFYFDYWGQGTTVTGGGSGGGSGGGSGGGSELVLTQSPKFMSTSVGDRVSVTCKASQNVGTNVAWYQQKPGQSPKPLIYSATYRNSGVPDRFTGSGSGTDFTLTITNVQSKDLADYFCQYNRYPYTSFFFTKLEIKRRSKIEVMYPPPYLDNEKSNGTIIHVKGKHLCPSPLFPGPSKPFWVLVVVGGVLACYSLLVTVAFIIFWVRSKRSRLLHSDYMNMTPRRPGPTRKHYQPYAPPRDFAAYRSRVKFSRSADAPAYQQGQNQLYNELNLGRREEYDVLDKRRGRDPEMGGKPRRKNPQEGLYNELQKDKMAEAYSEIGMKGERRRGKGHDGLYQGLSTATKDTYDALHMQALPPR

SEQ ID NO: 188 - protein, 246 aa, synthetic construct
  REGION 1..246: note = source = /note="Description of Artificial Sequence: Synthetic polypeptide"
DIQMTQTTSSLSASLGDRVTISCRASQDISKYLNWYQQKPDGTVKLLIYHTSRLHSGVPSRFSGSGSGTDYSLTISNLEQEDIATYFCQQGNTLPYTFGGGTKLEITGSTSGSGKPGSGEGSTKGEVKLQESGPGLVAPSQSLSVTCTVSGVSLPDYGVSWIRQPPRKGLEWLGVIWGSETTYYNSALKSRLTIIKDNSKSQVFLKMNSLQTDDTAIYYCAKHYYYGGSYAMDYWGQGTSVTVSSE

SEQ ID NO: 189 - protein, 439 aa, synthetic construct
  REGION 1..439: note = source = /note="Description of Artificial Sequence: Synthetic polypeptide"
DIQMTQTTSSLSASLGDRVTISCRASQDISKYLNWYQQKPDGTVKLLIYHTSRLHSGVPSRFSGSGSGTDYSLTISNLEQEDIATYFCQQGNTLPYTFGGGTKLEITGSTSGSGKPGSGEGSTKGEVKLQESGPGLVAPSQSLSVTCTVSGVSLPDYGVSWIRQPPRKGLEWLGVIWGSETTYYNSALKSRLTIIKDNSKSQVFLKMNSLQTDDTAIYYCAKHYYYGGSYAMDYWGQGTSVTVSSESKYGPPCPPCPMFWVLVVVGGVLACYSLLVTVAFIIFWVKRGRKKLLYIFKQPFMRPVQTTQEEDGCSCRFEEEEGGCELRVKFSRSADAPAYQQGQNQLYNELNLGRREEYDVLDKRRGRDPEMGGKPRRKNPQEGLYNELQKDKMAEAYSEIGMKGERRRGKGHDGLYQGLSTATKDTYDALHMQALPPRL

SEQ ID NO: 190 - protein, 819 aa, synthetic construct
  REGION 1..819: note = source = /note="Description of Artificial Sequence: Synthetic polypeptide"
DIQMTQTTSSLSASLGDRVTISCRASQDISKYLNWYQQKPDGTVKLLIYHTSRLHSGVPSRFSGSGSGTDYSLTISNLEQEDIATYFCQQGNTLPYTFGGGTKLEITGSTSGSGKPGSGEGSTKGEVKLQESGPGLVAPSQSLSVTCTVSGVSLPDYGVSWIRQPPRKGLEWLGVIWGSETTYYNSALKSRLTIIKDNSKSQVFLKMNSLQTDDTAIYYCAKHYYYGGSYAMDYWGQGTSVTVSSESKYGPPCPPCPMFWVLVVVGGVLACYSLLVTVAFIIFWVKRGRKKLLYIFKQPFMRPVQTTQEEDGCSCRFEEEEGGCELRVKFSRSADAPAYQQGQNQLYNELNLGRREEYDVLDKRRGRDPEMGGKPRRKNPQEGLYNELQKDKMAEAYSEIGMKGERRRGKGHDGLYQGLSTATKDTYDALHMQALPPRLEGGGEGRGSLLTCGDVEENPGPRMLLLVTSLLLCELPHPAFLLIPRKVCNGIGIGEFKDSLSINATNIKHFKNCTSISGDLHILPVAFRGDSFTHTPPLDPQELDILKTVKEITGFLLIQAWPENRTDLHAFENLEIIRGRTKQHGQFSLAVVSLNITSLGLRSLKEISDGDVIISGNKNLCYANTINWKKLFGTSGQKTKIISNRGENSCKATGQVCHALCSPEGCWGPEPRDCVSCRNVSRGRECVDKCNLLEGEPREFVENSECIQCHPECLPQAMNITCTGRGPDNCIQCAHYIDGPHCVKTCPAGVMGENNTLVWKYADAGHVCHLCHPNCTYGCTGPGLEGCPTNGPKIPSIATGMVGALLLLLVVALGIGLFM

SEQ ID NO: 191 - protein, 245 aa, synthetic construct
  REGION 1..245: note = source = /note="Description of Artificial Sequence: Synthetic polypeptide"
DIQMTQTTSSLSASLGDRVTISCRASQDISKYLNWYQQKPDGTVKLLIYHTSRLHSGVPSRFSGSGSGTDYSLTISNLEQEDIATYFCQQGNTLPYTFGGGTKLEITGSTSGSGKPGSGEGSTKGEVKLQESGPGLVAPSQSLSVTCTVSGVSLPDYGVSWIRQPPRKGLEWLGVIWGSETTYYNSALKSRLTIIKDNSKSQVFLKMNSLQTDDTAIYYCAKHYYYGGSYAMDYWGQGTSVTVSS

SEQ ID NO: 192 - protein, 467 aa, synthetic construct
  REGION 1..467: note = source = /note="Description of Artificial Sequence: Synthetic polypeptide"
DIQMTQTTSSLSASLGDRVTISCRASQDISKYLNWYQQKPDGTVKLLIYHTSRLHSGVPSRFSGSGSGTDYSLTISNLEQEDIATYFCQQGNTLPYTFGGGTKLEITGSTSGSGKPGSGEGSTKGEVKLQESGPGLVAPSQSLSVTCTVSGVSLPDYGVSWIRQPPRKGLEWLGVIWGSETTYYNSALKSRLTIIKDNSKSQVFLKMNSLQTDDTAIYYCAKHYYYGGSYAMDYWGQGTSVTVSSAAAIEVMYPPPYLDNEKSNGTIIHVKGKHLCPSPLFPGPSKPFWVLVVVGGVLACYSLLVTVAFIIFWVRSKRSRLLHSDYMNMTPRRPGPTRKHYQPYAPPRDFAAYRSRVKFSRSADAPAYQQGQNQLYNELNLGRREEYDVLDKRRGRDPEMGGKPRRKNPQEGLYNELQKDKMAEAYSEIGMKGERRRGKGHDGLYQGLSTATKDTYDALHMQALPPR

SEQ ID NO: 193 - protein, 119 aa, synthetic construct
  REGION 1..119: note = source = /note="Description of Artificial Sequence: Synthetic polypeptide"
QVQLLESGAELVRPGSSVKISCKASGYAFSSYWMNWVKQRPGQGLEWIGQIYPGDGDTNYNGKFKGQATLTADKSSSTAYMQLSGLTSEDSAVYSCARKTISSVVDFYFDYWGQGTTVT

SEQ ID NO: 194 - protein, 111 aa, synthetic construct
  REGION 1..111: note = source = /note="Description of Artificial Sequence: Synthetic polypeptide"
ELVLTQSPKFMSTSVGDRVSVTCKASQNVGTNVAWYQQKPGQSPKPLIYSATYRNSGVPDRFTGSGSGTDFTLTITNVQSKDLADYFYFCQYNRYPYTSGGGTKLEIKRRS

SEQ ID NO: 195 - protein, 242 aa, synthetic construct
  REGION 1..242: note = source = /note="Description of Artificial Sequence: Synthetic polypeptide"
EIVMTQSPATLSLSPGERATLSCRASQDISKYLNWYQQKPGQAPRLLIYHTSRLHSGIPARFSGSGSGTDYTLTISSLQPEDFAVYFCQQGNTLPYTFGQGTKLEIKGGGGSGGGGSGGGGSQVQLQESGPGLVKPSETLSLTCTVSGVSLPDYGVSWIRQPPGKGLEWIGVIWGSETTYYSSSLKSRVTISKDNSKNQVSLKLSSVTAADTAVYYCAKHYYYGGSYAMDYWGQGTLVTVSS

SEQ ID NO: 196 - protein, 486 aa, synthetic construct
  REGION 1..486: note = source = /note="Description of Artificial Sequence: Synthetic polypeptide"
MALPVTALLLPLALLLHAARPEIVMTQSPATLSLSPGERATLSCRASQDISKYLNWYQQKPGQAPRLLIYHTSRLHSGIPARFSGSGSGTDYTLTISSLQPEDFAVYFCQQGNTLPYTFGQGTKLEIKGGGGSGGGGSGGGGSQVQLQESGPGLVKPSETLSLTCTVSGVSLPDYGVSWIRQPPGKGLEWIGVIWGSETTYYSSSLKSRVTISKDNSKNQVSLKLSSVTAADTAVYYCAKHYYYGGSYAMDYWGQGTLVTVSSTTTPAPRPPTPAPTIASQPLSLRPEACRPAAGGAVHTRGLDFACDIYIWAPLAGTCGVLLLSLVITLYCKRGRKKLLYIFKQPFMRPVQTTQEEDGCSCRFPEEEEGGCELRVKFSRSADAPAYKQGQNQLYNELNLGRREEYDVLDKRRGRDPEMGGKPRRKNPQEGLYNELQKDKMAEAYSEIGMKGERRRGKGHDGLYQGLSTATKDTYDALHMQALPPR

SEQ ID NO: 197 - protein, 242 aa, synthetic construct
  REGION 1..242: note = source = /note="Description of Artificial Sequence: Synthetic polypeptide"
EIVMTQSPATLSLSPGERATLSCRASQDISKYLNWYQQKPGQAPRLLIYHTSRLHSGIPARFSGSGSGTDYTLTISSLQPEDFAVYFCQQGNTLPYTFGQGTKLEIKGGGGSGGGGSGGGGSQVQLQESGPGLVKPSETLSLTCTVSGVSLPDYGVSWIRQPPGKGLEWIGVIWGSETTYYQSSLKSRVTISKDNSKNQVSLKLSSVTAADTAVYYCAKHYYYGGSYAMDYWGQGTLVTVSS

SEQ ID NO: 198 - DNA, 813 bp, synthetic construct
  misc_feature 1..813: note = source = /note="Description of Artificial Sequence: Synthetic polynucleotide"
  source 1..813: mol_type = other DNA
atggccctccctgtcaccgccctgctgcttccgctggctcttctgctccacgccgctcggcccgaaattgtgatgacccagtcacccgccactcttagcctttcacccggtgagcgcgcaaccctgtcttgcagagcctcccaagacatctcaaaataccttaattggtatcaacagaagcccggacaggctcctcgccttctgatctaccacaccagccggctccattctggaatccctgccaggttcagcggtagcggatctgggaccgactacaccctcactatcagctcactgcagccagaggacttcgctgtctatttctgtcagcaagggaacaccctgccctacacctttggacagggcaccaagctcgagattaaaggtggaggtggcagcggaggaggtgggtccggcggtggaggaagccaggtccaactccaagaaagcggaccgggtcttgtgaagccatcagaaactctttcactgacttgtactgtgagcggagtgtctctccccgattacggggtgtcttggatcagacagccaccggggaagggtctggaatggattggagtgatttggggctctgagactacttactaccaatcatccctcaagtcacgcgtcaccatctcaaaggacaactctaagaatcaggtgtcactgaaactgtcatctgtgaccgcagccgacaccgccgtgtactattgcgctaagcattactattatggcgggagctacgcaatggattactggggacagggtactctggtcaccgtgtccagccaccaccatcatcaccatcaccat

SEQ ID NO: 199 - protein, 486 aa, synthetic construct
  REGION 1..486: note = source = /note="Description of Artificial Sequence: Synthetic polypeptide"
MALPVTALLLPLALLLHAARPEIVMTQSPATLSLSPGERATLSCRASQDISKYLNWYQQKPGQAPRLLIYHTSRLHSGIPARFSGSGSGTDYTLTISSLQPEDFAVYFCQQGNTLPYTFGQGTKLEIKGGGGSGGGGSGGGGSQVQLQESGPGLVKPSETLSLTCTVSGVSLPDYGVSWIRQPPGKGLEWIGVIWGSETTYYQSSLKSRVTISKDNSKNQVSLKLSSVTAADTAVYYCAKHYYYGGSYAMDYWGQGTLVTVSSTTTPAPRPPTPAPTIASQPLSLRPEACRPAAGGAVHTRGLDFACDIYIWAPLAGTCGVLLLSLVITLYCKRGRKKLLYIFKQPFMRPVQTTQEEDGCSCRFPEEEEGGCELRVKFSRSADAPAYKQGQNQLYNELNLGRREEYDVLDKRRGRDPEMGGKPRRKNPQEGLYNELQKDKMAEAYSEIGMKGERRRGKGHDGLYQGLSTATKDTYDALHMQALPPR

SEQ ID NO: 200 - DNA, 1458 bp, synthetic construct
  misc_feature 1..1458: note = source = /note="Description of Artificial Sequence: Synthetic polynucleotide"
  source 1..1458: mol_type = other DNA
atggccctccctgtcaccgccctgctgcttccgctggctcttctgctccacgccgctcggcccgaaattgtgatgacccagtcacccgccactcttagcctttcacccggtgagcgcgcaaccctgtcttgcagagcctcccaagacatctcaaaataccttaattggtatcaacagaagcccggacaggctcctcgccttctgatctaccacaccagccggctccattctggaatccctgccaggttcagcggtagcggatctgggaccgactacaccctcactatcagctcactgcagccagaggacttcgctgtctatttctgtcagcaagggaacaccctgccctacacctttggacagggcaccaagctcgagattaaaggtggaggtggcagcggaggaggtgggtccggcggtggaggaagccaggtccaactccaagaaagcggaccgggtcttgtgaagccatcagaaactctttcactgacttgtactgtgagcggagtgtctctccccgattacggggtgtcttggatcagacagccaccggggaagggtctggaatggattggagtgatttggggctctgagactacttactaccaatcatccctcaagtcacgcgtcaccatctcaaaggacaactctaagaatcaggtgtcactgaaactgtcatctgtgaccgcagccgacaccgccgtgtactattgcgctaagcattactattatggcgggagctacgcaatggattactggggacagggtactctggtcaccgtgtccagcaccactaccccagcaccgaggccacccaccccggctcctaccatcgcctcccagcctctgtccctgcgtccggaggcatgtagacccgcagctggtggggccgtgcatacccggggtcttgacttcgcctgcgatatctacatttgggcccctctggctggtacttgcggggtcctgctgctttcactcgtgatcactctttactgtaagcgcggtcggaagaagctgctgtacatctttaagcaacccttcatgaggcctgtgcagactactcaagaggaggacggctgttcatgccggttcccagaggaggaggaaggcggctgcgaactgcgcgtgaaattcagccgcagcgcagatgctccagcctacaagcaggggcagaaccagctctacaacgaactcaatcttggtcggagagaggagtacgacgtgctggacaagcggagaggacgggacccagaaatgggcgggaagccgcgcagaaagaatccccaagagggcctgtacaacgagctccaaaaggataagatggcagaagcctatagcgagattggtatgaaaggggaacgcagaagaggcaaaggccacgacggactgtaccagggactcagcaccgccaccaaggacacctatgacgctcttcacatgcaggccctgccgcctcgg

SEQ ID NO: 201 - protein, 271 aa, synthetic construct
  REGION 1..271: note = source = /note="Description of Artificial Sequence: Synthetic polypeptide"
MALPVTALLLPLALLLHAARPEIVMTQSPATLSLSPGERATLSCRASQDISKYLNWYQQKPGQAPRLLIYHTSRLHSGIPARFSGSGSGTDYTLTISSLQPEDFAVYFCQQGNTLPYTFGQGTKLEIKGGGGSGGGGSGGGGSQVQLQESGPGLVKPSETLSLTCTVSGVSLPDYGVSWIRQPPGKGLEWIGVIWGSETTYYQSSLKSRVTISKDNSKNQVSLKLSSVTAADTAVYYCAKHYYYGGSYAMDYWGQGTLVTVSSHHHHHHHH

SEQ ID NO: 202 - protein, 242 aa, synthetic construct
  REGION 1..242: note = source = /note="Description of Artificial Sequence: Synthetic polypeptide"
QVQLQESGPGLVKPSETLSLTCTVSGVSLPDYGVSWIRQPPGKGLEWIGVIWGSETTYYSSSLKSRVTISKDNSKNQVSLKLSSVTAADTAVYYCAKHYYYGGSYAMDYWGQGTLVTVSSGGGGSGGGGSGGGGSEIVMTQSPATLSLSPGERATLSCRASQDISKYLNWYQQKPGQAPRLLIYHTSRLHSGIPARFSGSGSGTDYTLTISSLQPEDFAVYFCQQGNTLPYTFGQGTKLEIK

SEQ ID NO: 203 - protein, 486 aa, synthetic construct
  REGION 1..486: note = source = /note="Description of Artificial Sequence: Synthetic polypeptide"
MALPVTALLLPLALLLHAARPQVQLQESGPGLVKPSETLSLTCTVSGVSLPDYGVSWIRQPPGKGLEWIGVIWGSETTYYSSSLKSRVTISKDNSKNQVSLKLSSVTAADTAVYYCAKHYYYGGSYAMDYWGQGTLVTVSSGGGGSGGGGSGGGGSEIVMTQSPATLSLSPGERATLSCRASQDISKYLNWYQQKPGQAPRLLIYHTSRLHSGIPARFSGSGSGTDYTLTISSLQPEDFAVYFCQQGNTLPYTFGQGTKLEIKTTTPAPRPPTPAPTIASQPLSLRPEACRPAAGGAVHTRGLDFACDIYIWAPLAGTCGVLLLSLVITLYCKRGRKKLLYIFKQPFMRPVQTTQEEDGCSCRFPEEEEGGCELRVKFSRSADAPAYKQGQNQLYNELNLGRREEYDVLDKRRGRDPEMGGKPRRKNPQEGLYNELQKDKMAEAYSEIGMKGERRRGKGHDGLYQGLSTATKDTYDALHMQALPPR

SEQ ID NO: 204 - protein, 242 aa, synthetic construct
  REGION 1..242: note = source = /note="Description of Artificial Sequence: Synthetic polypeptide"
QVQLQESGPGLVKPSETLSLTCTVSGVSLPDYGVSWIRQPPGKGLEWIGVIWGSETTYYQSSLKSRVTISKDNSKNQVSLKLSSVTAADTAVYYCAKHYYYGGSYAMDYWGQGTLVTVSSGGGGSGGGGSGGGGSEIVMTQSPATLSLSPGERATLSCRASQDISKYLNWYQQKPGQAPRLLIYHTSRLHSGIPARFSGSGSGTDYTLTISSLQPEDFAVYFCQQGNTLPYTFGQGTKLEIK

SEQ ID NO: 205 - protein, 486 aa, synthetic construct
  REGION 1..486: note = source = /note="Description of Artificial Sequence: Synthetic polypeptide"
MALPVTALLLPLALLLHAARPQVQLQESGPGLVKPSETLSLTCTVSGVSLPDYGVSWIRQPPGKGLEWIGVIWGSETTYYQSSLKSRVTISKDNSKNQVSLKLSSVTAADTAVYYCAKHYYYGGSYAMDYWGQGTLVTVSSGGGGSGGGGSGGGGSEIVMTQSPATLSLSPGERATLSCRASQDISKYLNWYQQKPGQAPRLLIYHTSRLHSGIPARFSGSGSGTDYTLTISSLQPEDFAVYFCQQGNTLPYTFGQGTKLEIKTTTPAPRPPTPAPTIASQPLSLRPEACRPAAGGAVHTRGLDFACDIYIWAPLAGTCGVLLLSLVITLYCKRGRKKLLYIFKQPFMRPVQTTQEEDGCSCRFPEEEEGGCELRVKFSRSADAPAYKQGQNQLYNELNLGRREEYDVLDKRRGRDPEMGGKPRRKNPQEGLYNELQKDKMAEAYSEIGMKGERRRGKGHDGLYQGLSTATKDTYDALHMQALPPR

SEQ ID NO: 206 - protein, 247 aa, synthetic construct
  REGION 1..247: note = source = /note="Description of Artificial Sequence: Synthetic polypeptide"
EIVMTQSPATLSLSPGERATLSCRASQDISKYLNWYQQKPGQAPRLLIYHTSRLHSGIPARFSGSGSGTDYTLTISSLQPEDFAVYFCQQGNTLPYTFGQGTKLEIKGGGGSGGGGSGGGGSGGGGSQVQLQESGPGLVKPSETLSLTCTVSGVSLPDYGVSWIRQPPGKGLEWIGVIWGSETTYYSSSLKSRVTISKDNSKNQVSLKLSSVTAADTAVYYCAKHYYYGGSYAMDYWGQGTLVTVSS

SEQ ID NO: 207 - protein, 491 aa, synthetic construct
  REGION 1..491: note = source = /note="Description of Artificial Sequence: Synthetic polypeptide"
MALPVTALLLPLALLLHAARPEIVMTQSPATLSLSPGERATLSCRASQDISKYLNWYQQKPGQAPRLLIYHTSRLHSGIPARFSGSGSGTDYTLTISSLQPEDFAVYFCQQGNTLPYTFGQGTKLEIKGGGGSGGGGSGGGGSGGGGSQVQLQESGPGLVKPSETLSLTCTVSGVSLPDYGVSWIRQPPGKGLEWIGVIWGSETTYYSSSLKSRVTISKDNSKNQVSLKLSSVTAADTAVYYCAKHYYYGGSYAMDYWGQGTLVTVSSTTTPAPRPPTPAPTIASQPLSLRPEACRPAAGGAVHTRGLDFACDIYIWAPLAGTCGVLLLSLVITLYCKRGRKKLLYIFKQPFMRPVQTTQEEDGCSCRFPEEEEGGCELRVKFSRSADAPAYKQGQNQLYNELNLGRREEYDVLDKRRGRDPEMGGKPRRKNPQEGLYNELQKDKMAEAYSEIGMKGERRRGKGHDGLYQGLSTATKDTYDALHMQALPPR

SEQ ID NO: 208 - protein, 247 aa, synthetic construct
  REGION 1..247: note = source = /note="Description of Artificial Sequence: Synthetic polypeptide"
EIVMTQSPATLSLSPGERATLSCRASQDISKYLNWYQQKPGQAPRLLIYHTSRLHSGIPARFSGSGSGTDYTLTISSLQPEDFAVYFCQQGNTLPYTFGQGTKLEIKGGGGSGGGGSGGGGSGGGGSQVQLQESGPGLVKPSETLSLTCTVSGVSLPDYGVSWIRQPPGKGLEWIGVIWGSETTYYQSSLKSRVTISKDNSKNQVSLKLSSVTAADTAVYYCAKHYYYGGSYAMDYWGQGTLVTVSS

SEQ ID NO: 209 - protein, 491 aa, synthetic construct
  REGION 1..491: note = source = /note="Description of Artificial Sequence: Synthetic polypeptide"
MALPVTALLLPLALLLHAARPEIVMTQSPATLSLSPGERATLSCRASQDISKYLNWYQQKPGQAPRLLIYHTSRLHSGIPARFSGSGSGTDYTLTISSLQPEDFAVYFCQQGNTLPYTFGQGTKLEIKGGGGSGGGGSGGGGSGGGGSQVQLQESGPGLVKPSETLSLTCTVSGVSLPDYGVSWIRQPPGKGLEWIGVIWGSETTYYQSSLKSRVTISKDNSKNQVSLKLSSVTAADTAVYYCAKHYYYGGSYAMDYWGQGTLVTVSSTTTPAPRPPTPAPTIASQPLSLRPEACRPAAGGAVHTRGLDFACDIYIWAPLAGTCGVLLLSLVITLYCKRGRKKLLYIFKQPFMRPVQTTQEEDGCSCRFPEEEEGGCELRVKFSRSADAPAYKQGQNQLYNELNLGRREEYDVLDKRRGRDPEMGGKPRRKNPQEGLYNELQKDKMAEAYSEIGMKGERRRGKGHDGLYQGLSTATKDTYDALHMQALPPR

SEQ ID NO: 210 - protein, 247 aa, synthetic construct
  REGION 1..247: note = source = /note="Description of Artificial Sequence: Synthetic polypeptide"
QVQLQESGPGLVKPSETLSLTCTVSGVSLPDYGVSWIRQPPGKGLEWIGVIWGSETTYYSSSLKSRVTISKDNSKNQVSLKLSSVTAADTAVYYCAKHYYYGGSYAMDYWGQGTLVTVSSGGGGSGGGGSGGGGSGGGGSEIVMTQSPATLSLSPGERATLSCRASQDISKYLNWYQQKPGQAPRLLIYHTSRLHSGIPARFSGSGSGTDYTLTISSLQPEDFAVYFCQQGNTLPYTFGQGTKLEIK

SEQ ID NO: 211 - protein, 491 aa, synthetic construct
  REGION 1..491: note = source = /note="Description of Artificial Sequence: Synthetic polypeptide"
MALPVTALLLPLALLLHAARPQVQLQESGPGLVKPSETLSLTCTVSGVSLPDYGVSWIRQPPGKGLEWIGVIWGSETTYYSSSLKSRVTISKDNSKNQVSLKLSSVTAADTAVYYCAKHYYYGGSYAMDYWGQGTLVTVSSGGGGSGGGGSGGGGSGGGGSEIVMTQSPATLSLSPGERATLSCRASQDISKYLNWYQQKPGQAPRLLIYHTSRLHSGIPARFSGSGSGTDYTLTISSLQPEDFAVYFCQQGNTLPYTFGQGTKLEIKTTTPAPRPPTPAPTIASQPLSLRPEACRPAAGGAVHTRGLDFACDIYIWAPLAGTCGVLLLSLVITLYCKRGRKKLLYIFKQPFMRPVQTTQEEDGCSCRFPEEEEGGCELRVKFSRSADAPAYKQGQNQLYNELNLGRREEYDVLDKRRGRDPEMGGKPRRKNPQEGLYNELQKDKMAEAYSEIGMKGERRRGKGHDGLYQGLSTATKDTYDALHMQALPPR

SEQ ID NO: 212 - protein, 247 aa, synthetic construct
  REGION 1..247: note = source = /note="Description of Artificial Sequence: Synthetic polypeptide"
QVQLQESGPGLVKPSETLSLTCTVSGVSLPDYGVSWIRQPPGKGLEWIGVIWGSETTYYQSSLKSRVTISKDNSKNQVSLKLSSVTAADTAVYYCAKHYYYGGSYAMDYWGQGTLVTVSSGGGGSGGGGSGGGGSGGGGSEIVMTQSPATLSLSPGERATLSCRASQDISKYLNWYQQKPGQAPRLLIYHTSRLHSGIPARFSGSGSGTDYTLTISSLQPEDFAVYFCQQGNTLPYTFGQGTKLEIK

SEQ ID NO: 213 - protein, 491 aa, synthetic construct
  REGION 1..491: note = source = /note="Description of Artificial Sequence: Synthetic polypeptide"
MALPVTALLLPLALLLHAARPQVQLQESGPGLVKPSETLSLTCTVSGVSLPDYGVSWIRQPPGKGLEWIGVIWGSETTYYQSSLKSRVTISKDNSKNQVSLKLSSVTAADTAVYYCAKHYYYGGSYAMDYWGQGTLVTVSSGGGGSGGGGSGGGGSGGGGSEIVMTQSPATLSLSPGERATLSCRASQDISKYLNWYQQKPGQAPRLLIYHTSRLHSGIPARFSGSGSGTDYTLTISSLQPEDFAVYFCQQGNTLPYTFGQGTKLEIKTTTPAPRPPTPAPTIASQPLSLRPEACRPAAGGAVHTRGLDFACDIYIWAPLAGTCGVLLLSLVITLYCKRGRKKLLYIFKQPFMRPVQTTQEEDGCSCRFPEEEEGGCELRVKFSRSADAPAYKQGQNQLYNELNLGRREEYDVLDKRRGRDPEMGGKPRRKNPQEGLYNELQKDKMAEAYSEIGMKGERRRGKGHDGLYQGLSTATKDTYDALHMQALPPR

SEQ ID NO: 214 - protein, 247 aa, synthetic construct
  REGION 1..247: note = source = /note="Description of Artificial Sequence: Synthetic polypeptide"
EIVMTQSPATLSLSPGERATLSCRASQDISKYLNWYQQKPGQAPRLLIYHTSRLHSGIPARFSGSGSGTDYTLTISSLQPEDFAVYFCQQGNTLPYTFGQGTKLEIKGGGGSGGGGSGGGGSGGGGSQVQLQESGPGLVKPSETLSLTCTVSGVSLPDYGVSWIRQPPGKGLEWIGVIWGSETTYYNSSLKSRVTISKDNSKNQVSLKLSSVTAADTAVYYCAKHYYYGGSYAMDYWGQGTLVTVSS

SEQ ID NO: 215 - protein, 491 aa, synthetic construct
  REGION 1..491: note = source = /note="Description of Artificial Sequence: Synthetic polypeptide"
MALPVTALLLPLALLLHAARPEIVMTQSPATLSLSPGERATLSCRASQDISKYLNWYQQKPGQAPRLLIYHTSRLHSGIPARFSGSGSGTDYTLTISSLQPEDFAVYFCQQGNTLPYTFGQGTKLEIKGGGGSGGGGSGGGGSGGGGSQVQLQESGPGLVKPSETLSLTCTVSGVSLPDYGVSWIRQPPGKGLEWIGVIWGSETTYYNSSLKSRVTISKDNSKNQVSLKLSSVTAADTAVYYCAKHYYYGGSYAMDYWGQGTLVTVSSTTTPAPRPPTPAPTIASQPLSLRPEACRPAAGGAVHTRGLDFACDIYIWAPLAGTCGVLLLSLVITLYCKRGRKKLLYIFKQPFMRPVQTTQEEDGCSCRFPEEEEGGCELRVKFSRSADAPAYKQGQNQLYNELNLGRREEYDVLDKRRGRDPEMGGKPRRKNPQEGLYNELQKDKMAEAYSEIGMKGERRRGKGHDGLYQGLSTATKDTYDALHMQALPPR

SEQ ID NO: 216 - protein, 247 aa, synthetic construct
  REGION 1..247: note = source = /note="Description of Artificial Sequence: Synthetic polypeptide"
QVQLQESGPGLVKPSETLSLTCTVSGVSLPDYGVSWIRQPPGKGLEWIGVIWGSETTYYNSSLKSRVTISKDNSKNQVSLKLSSVTAADTAVYYCAKHYYYGGSYAMDYWGQGTLVTVSSGGGGSGGGGSGGGGSGGGGSEIVMTQSPATLSLSPGERATLSCRASQDISKYLNWYQQKPGQAPRLLIYHTSRLHSGIPARFSGSGSGTDYTLTISSLQPEDFAVYFCQQGNTLPYTFGQGTKLEIK

SEQ ID NO: 217 - protein, 242 aa, synthetic construct
  REGION 1..242: note = source = /note="Description of Artificial Sequence: Synthetic polypeptide"
EIVMTQSPATLSLSPGERATLSCRASQDISKYLNWYQQKPGQAPRLLIYHTSRLHSGIPARFSGSGSGTDYTLTISSLQPEDFAVYFCQQGNTLPYTFGQGTKLEIKGGGGSGGGGSGGGGSQVQLQESGPGLVKPSETLSLTCTVSGVSLPDYGVSWIRQPPGKGLEWIGVIWGSETTYYNSSLKSRVTISKDNSKNQVSLKLSSVTAADTAVYYCAKHYYYGGSYAMDYWGQGTLVTVSS

SEQ ID NO: 218 - protein, 491 aa, synthetic construct
  REGION 1..491: note = source = /note="Description of Artificial Sequence: Synthetic polypeptide"
MALPVTALLLPLALLLHAARPQVQLQESGPGLVKPSETLSLTCTVSGVSLPDYGVSWIRQPPGKGLEWIGVIWGSETTYYNSSLKSRVTISKDNSKNQVSLKLSSVTAADTAVYYCAKHYYYGGSYAMDYWGQGTLVTVSSGGGGSGGGGSGGGGSGGGGSEIVMTQSPATLSLSPGERATLSCRASQDISKYLNWYQQKPGQAPRLLIYHTSRLHSGIPARFSGSGSGTDYTLTISSLQPEDFAVYFCQQGNTLPYTFGQGTKLEIKTTTPAPRPPTPAPTIASQPLSLRPEACRPAAGGAVHTRGLDFACDIYIWAPLAGTCGVLLLSLVITLYCKRGRKKLLYIFKQPFMRPVQTTQEEDGCSCRFPEEEEGGCELRVKFSRSADAPAYKQGQNQLYNELNLGRREEYDVLDKRRGRDPEMGGKPRRKNPQEGLYNELQKDKMAEAYSEIGMKGERRRGKGHDGLYQGLSTATKDTYDALHMQALPPR

SEQ ID NO: 219 - protein, 242 aa, synthetic construct
  REGION 1..242: note = source = /note="Description of Artificial Sequence: Synthetic polypeptide"
QVQLQESGPGLVKPSETLSLTCTVSGVSLPDYGVSWIRQPPGKGLEWIGVIWGSETTYYNSSLKSRVTISKDNSKNQVSLKLSSVTAADTAVYYCAKHYYYGGSYAMDYWGQGTLVTVSSGGGGSGGGGSGGGGSEIVMTQSPATLSLSPGERATLSCRASQDISKYLNWYQQKPGQAPRLLIYHTSRLHSGIPARFSGSGSGTDYTLTISSLQPEDFAVYFCQQGNTLPYTFGQGTKLEIK

SEQ ID NO: 220 - protein, 486 aa, synthetic construct
  REGION 1..486: note = source = /note="Description of Artificial Sequence: Synthetic polypeptide"
MALPVTALLLPLALLLHAARPEIVMTQSPATLSLSPGERATLSCRASQDISKYLNWYQQKPGQAPRLLIYHTSRLHSGIPARFSGSGSGTDYTLTISSLQPEDFAVYFCQQGNTLPYTFGQGTKLEIKGGGGSGGGGSGGGGSQVQLQESGPGLVKPSETLSLTCTVSGVSLPDYGVSWIRQPPGKGLEWIGVIWGSETTYYNSSLKSRVTISKDNSKNQVSLKLSSVTAADTAVYYCAKHYYYGGSYAMDYWGQGTLVTVSSTTTPAPRPPTPAPTIASQPLSLRPEACRPAAGGAVHTRGLDFACDIYIWAPLAGTCGVLLLSLVITLYCKRGRKKLLYIFKQPFMRPVQTTQEEDGCSCRFPEEEEGGCELRVKFSRSADAPAYKQGQNQLYNELNLGRREEYDVLDKRRGRDPEMGGKPRRKNPQEGLYNELQKDKMAEAYSEIGMKGERRRGKGHDGLYQGLSTATKDTYDALHMQALPPR

SEQ ID NO: 221 - protein, 5 aa, synthetic construct
  REGION 1..5: note = source = /note="Description of Artificial Sequence: Synthetic peptide"
DYGVS

SEQ ID NO: 222 - protein, 16 aa, synthetic construct
  REGION 1..16: note = source = /note="Description of Artificial Sequence: Synthetic peptide"
VIWGSETTYYNSALKS

SEQ ID NO: 223 - protein, 12 aa, synthetic construct
  REGION 1..12: note = source = /note="Description of Artificial Sequence: Synthetic peptide"
HYYYGGSYAMDY

SEQ ID NO: 224 - protein, 11 aa, synthetic construct
  REGION 1..11: note = source = /note="Description of Artificial Sequence: Synthetic peptide"
RASQDISKYLN

SEQ ID NO: 225 - protein, 7 aa, synthetic construct
  REGION 1..7: note = source = /note="Description of Artificial Sequence: Synthetic peptide"
HTSRLHS

SEQ ID NO: 226 - protein, 9 aa, synthetic construct
  REGION 1..9: note = source = /note="Description of Artificial Sequence: Synthetic peptide"
QQGNTLPYT

SEQ ID NO: 227 - protein, 16 aa, synthetic construct
  REGION 1..16: note = source = /note="Description of Artificial Sequence: Synthetic peptide"
VIWGSETTYYSSSLKS

SEQ ID NO: 228 - protein, 16 aa, synthetic construct
  REGION 1..16: note = source = /note="Description of Artificial Sequence: Synthetic peptide"
VIWGSETTYYQSSLKS

SEQ ID NO: 229 - protein, 16 aa, synthetic construct
  REGION 1..16: note = source = /note="Description of Artificial Sequence: Synthetic peptide"
VIWGSETTYYNSSLKS

SEQ ID NO: 230 - protein, 10 aa, synthetic construct
  REGION 1..10: note = source = /note="Description of Artificial Sequence: Synthetic peptide"
GVSLPDYGVS

SEQ ID NO: 231 - protein, 10 aa, synthetic construct
  REGION 1..10: note = source = /note="Description of Artificial Sequence: Synthetic peptide"
GYTFTGYYMH

SEQ ID NO: 232 - protein, 10 aa, synthetic construct
  REGION 1..10: note = source = /note="Description of Artificial Sequence: Synthetic peptide"
GYIFTGYYIH

SEQ ID NO: 233 - protein, 10 aa, synthetic construct
  REGION 1..10: note = source = /note="Description of Artificial Sequence: Synthetic peptide"
GYTFTDYYMH

SEQ ID NO: 234 - protein, 17 aa, synthetic construct
  REGION 1..17: note = source = /note="Description of Artificial Sequence: Synthetic peptide"
WINPNSGGTNYAQKFQG

SEQ ID NO: 235 - protein, 17 aa, synthetic construct
  REGION 1..17: note = source = /note="Description of Artificial Sequence: Synthetic peptide"
WINPNSGDTNYAQKFQG

SEQ ID NO: 236 - protein, 12 aa, synthetic construct
  REGION 1..12: note = source = /note="Description of Artificial Sequence: Synthetic peptide"
DMNILATVPFDI

SEQ ID NO: 237 - protein, 11 aa, synthetic construct
  REGION 1..11: note = source = /note="Description of Artificial Sequence: Synthetic peptide"
RASQSISSYLN

SEQ ID NO: 238 - protein, 11 aa, synthetic construct
  REGION 1..11: note = source = /note="Description of Artificial Sequence: Synthetic peptide"
RASQSISTYLN

SEQ ID NO: 239 - protein, 7 aa, synthetic construct
  REGION 1..7: note = source = /note="Description of Artificial Sequence: Synthetic peptide"
AAFSLQS

SEQ ID NO: 240 - protein, 7 aa, synthetic construct
  REGION 1..7: note = source = /note="Description of Artificial Sequence: Synthetic peptide"
AASSLQS

SEQ ID NO: 241 - protein, 9 aa, synthetic construct
  REGION 1..9: note = source = /note="Description of Artificial Sequence: Synthetic peptide"
QQGDSVPLT

SEQ ID NO: 242 - protein, 10 aa, synthetic construct
  REGION 1..10: note = source = /note="Description of Artificial Sequence: Synthetic peptide"
GYTFTSYWMN

SEQ ID NO: 243 - protein, 17 aa, synthetic construct
  REGION 1..17: note = source = /note="Description of Artificial Sequence: Synthetic peptide"
RIDPYDSETHYNQKFKD

SEQ ID NO: 244 - protein, 6 aa, synthetic construct
  REGION 1..6: note = source = /note="Description of Artificial Sequence: Synthetic peptide"
GNWDDY

SEQ ID NO: 245 - protein, 11 aa, synthetic construct
  REGION 1..11: note = source = /note="Description of Artificial Sequence: Synthetic peptide"
RASKSISKDLA

SEQ ID NO: 246 - protein, 7 aa, synthetic construct
  REGION 1..7: note = source = /note="Description of Artificial Sequence: Synthetic peptide"
SGSTLQS

SEQ ID NO: 247 - protein, 9 aa, synthetic construct
  REGION 1..9: note = source = /note="Description of Artificial Sequence: Synthetic peptide"
QQHNKYPYT

SEQ ID NO: 248 - DNA, 1461 bp, synthetic construct
  misc_feature 1..1461: note = source = /note="Description of Artificial Sequence: Synthetic polynucleotide"
  source 1..1461: mol_type = other DNA
atggccctccctgtcaccgccctgctgcttccgctggctcttctgctccacgccgctcggccccaagtgcaactcgtccaaagcggagcggaagtcaagaaacccggagcgagcgtgaaagtgtcctgcaaagcctccggctacacctttacgggctactacatgcactgggtgcgccaggcaccaggacagggtcttgaatggatgggatggatcaaccctaattcgggcggaactaactacgcacagaagttccaggggagagtgactctgactcgggatacctccatctcaactgtctacatggaactctcccgcttgcggtcagatgatacggcagtgtactactgcgcccgcgacatgaatatcctggctaccgtgccgttcgacatctggggacaggggactatggttactgtctcatcgggcggtggaggttcaggaggaggcggctcgggaggcggaggttcggacattcagatgacccagtccccatcctctctgtcggccagcgtcggagatagggtgaccattacctgtcgggcctcgcaaagcatctcctcgtacctcaactggtatcagcaaaagccgggaaaggcgcctaagctgctgatctacgccgcttcgagcttgcaaagcggggtgccatccagattctcgggatcaggctcaggaaccgacttcaccctgaccgtgaacagcctccagccggaggactttgccacttactactgccagcagggagactccgtgccgcttactttcggggggggtacccgcctggagatcaagaccactaccccagcaccgaggccacccaccccggctcctaccatcgcctcccagcctctgtccctgcgtccggaggcatgtagacccgcagctggtggggccgtgcatacccggggtcttgacttcgcctgcgatatctacatttgggcccctctggctggtacttgcggggtcctgctgctttcactcgtgatcactctttactgtaagcgcggtcggaagaagctgctgtacatctttaagcaacccttcatgaggcctgtgcagactactcaagaggaggacggctgttcatgccggttcccagaggaggaggaaggcggctgcgaactgcgcgtgaaattcagccgcagcgcagatgctccagcctacaagcaggggcagaaccagctctacaacgaactcaatcttggtcggagagaggagtacgacgtgctggacaagcggagaggacgggacccagaaatgggcgggaagccgcgcagaaagaatccccaagagggcctgtacaacgagctccaaaaggataagatggcagaagcctatagcgagattggtatgaaaggggaacgcagaagaggcaaaggccacgacggactgtaccagggactcagcaccgccaccaaggacacctatgacgctcttcacatgcaggccctgccgcctcgg

SEQ ID NO: 249 - protein, 487 aa, synthetic construct
  REGION 1..487: note = source = /note="Description of Artificial Sequence: Synthetic polypeptide"
MALPVTALLLPLALLLHAARPQVQLVQSGAEVKKPGASVKVSCKASGYTFTGYYMHWVRQAPGQGLEWMGWINPNSGGTNYAQKFQGRVTLTRDTSISTVYMELSRLRSDDTAVYYCARDMNILATVPFDIWGQGTMVTVSSGGGGSGGGGSGGGGSDIQMTQSPSSLSASVGDRVTITCRASQSISSYLNWYQQKPGKAPKLLIYAASSLQSGVPSRFSGSGSGTDFTLTVNSLQPEDFATYYCQQGDSVPLTFGGGTRLEIKTTTPAPRPPTPAPTIASQPLSLRPEACRPAAGGAVHTRGLDFACDIYIWAPLAGTCGVLLLSLVITLYCKRGRKKLLYIFKQPFMRPVQTTQEEDGCSCRFPEEEEGGCELRVKFSRSADAPAYKQGQNQLYNELNLGRREEYDVLDKRRGRDPEMGGKPRRKNPQEGLYNELQKDKMAEAYSEIGMKGERRRGKGHDGLYQGLSTATKDTYDALHMQALPPR

SEQ ID NO: 250 - protein, 264 aa, synthetic construct
  REGION 1..264: note = source = /note="Description of Artificial Sequence: Synthetic polypeptide"
MALPVTALLLPLALLLHAARPQVQLVQSGAEVKKPGASVKVSCKASGYTFTGYYMHWVRQAPGQGLEWMGWINPNSGGTNYAQKFQGRVTLTRDTSISTVYMELSRLRSDDTAVYYCARDMNILATVPFDIWGQGTMVTVSSGGGGSGGGGSGGGGSDIQMTQSPSSLSASVGDRVTITCRASQSISSYLNWYQQKPGKAPKLLIYAASSLQSGVPSRFSGSGSGTDFTLTVNSLQPEDFATYYCQQGDSVPLTFGGGTRLEIK

SEQ ID NO: 251 - protein, 121 aa, synthetic construct
  REGION 1..121: note = source = /note="Description of Artificial Sequence: Synthetic polypeptide"
QVQLVQSGAEVKKPGASVKVSCKASGYTFTGYYMHWVRQAPGQGLEWMGWINPNSGGTNYAQKFQGRVTLTRDTSISTVYMELSRLRSDDTAVYYCARDMNILATVPFDIWGQGTMVTVSS

SEQ ID NO: 252 - protein, 107 aa, synthetic construct
  REGION 1..107: note = source = /note="Description of Artificial Sequence: Synthetic polypeptide"
DIQMTQSPSSLSASVGDRVTITCRASQSISSYLNWYQQKPGKAPKLLIYAASSLQSGVPSRFSGSGSGTDFTLTVNSLQPEDFATYYCQQGDSVPLTFGGGTRLEIK

SEQ ID NO: 253 - DNA, 1461 bp, synthetic construct
  misc_feature 1..1461: note = source = /note="Description of Artificial Sequence: Synthetic polynucleotide"
  source 1..1461: mol_type = other DNA
atggccctccctgtcaccgccctgctgcttccgctggctcttctgctccacgccgctcggccccaagtccaactcgttcaatccggcgcagaagtcaagaagccaggagcatcagtgaaagtgtcctgcaaagcctcaggctacatcttcacgggatactacatccactgggtgcgccaggctccgggccagggccttgagtggatgggctggatcaaccctaactctgggggaaccaactacgctcagaagttccaggggagggtcactatgactcgcgatacctccatctccactgcgtacatggaactctcgggactgagatccgacgatcctgccgtgtactactgcgcccgggacatgaacatcttggcgaccgtgccgtttgacatttggggacagggcaccctcgtcactgtgtcgagcggtggaggaggctcggggggtggcggatcaggagggggaggaagcgacatccagctgactcagagcccatcgtcgttgtccgcgtcggtgggggatagagtgaccattacttgccgcgccagccagagcatctcatcatatctgaattggtaccagcagaagcccggaaaggccccaaaactgctgatctacgctgcaagcagcctccaatcgggagtgccgtcacggttctccgggtccggttcgggaactgactttaccctgaccgtgaattcgctgcaaccggaggatttcgccacgtactactgtcagcaaggagactccgtgccgctgaccttcggtggaggcaccaaggtcgaaatcaagaccactaccccagcaccgaggccacccaccccggctcctaccatcgcctcccagcctctgtccctgcgtccggaggcatgtagacccgcagctggtggggccgtgcatacccggggtcttgacttcgcctgcgatatctacatttgggcccctctggctggtacttgcggggtcctgctgctttcactcgtgatcactctttactgtaagcgcggtcggaagaagctgctgtacatctttaagcaacccttcatgaggcctgtgcagactactcaagaggaggacggctgttcatgccggttcccagaggaggaggaaggcggctgcgaactgcgcgtgaaattcagccgcagcgcagatgctccagcctacaagcaggggcagaaccagctctacaacgaactcaatcttggtcggagagaggagtacgacgtgctggacaagcggagaggacgggacccagaaatgggcgggaagccgcgcagaaagaatccccaagagggcctgtacaacgagctccaaaaggataagatggcagaagcctatagcgagattggtatgaaaggggaacgcagaagaggcaaaggccacgacggactgtaccagggactcagcaccgccaccaaggacacctatgacgctcttcacatgcaggccctgccgcctcgg

SEQ ID NO: 254 - protein, 487 aa, synthetic construct
  REGION 1..487: note = source = /note="Description of Artificial Sequence: Synthetic polypeptide"
MALPVTALLLPLALLLHAARPQVQLVQSGAEVKKPGASVKVSCKASGYIFTGYYIHWVRQAPGQGLEWMGWINPNSGGTNYAQKFQGRVTMTRDTSISTAYMELSGLRSDDPAVYYCARDMNILATVPFDIWGQGTLVTVSSGGGGSGGGGSGGGGSDIQLTQSPSSLSASVGDRVTITCRASQSISSYLNWYQQKPGKAPKLLIYAASSLQSGVPSRFSGSGSGTDFTLTVNSLQPEDFATYYCQQGDSVPLTFGGGTKVEIKTTTPAPRPPTPAPTIASQPLSLRPEACRPAAGGAVHTRGLDFACDIYIWAPLAGTCGVLLLSLVITLYCKRGRKKLLYIFKQPFMRPVQTTQEEDGCSCRFPEEEEGGCELRVKFSRSADAPAYKQGQNQLYNELNLGRREEYDVLDKRRGRDPEMGGKPRRKNPQEGLYNELQKDKMAEAYSEIGMKGERRRGKGHDGLYQGLSTATKDTYDALHMQALPPR

SEQ ID NO: 255 - protein, 264 aa, synthetic construct
  REGION 1..264: note = source = /note="Description of Artificial Sequence: Synthetic polypeptide"
MALPVTALLLPLALLLHAARPQVQLVQSGAEVKKPGASVKVSCKASGYIFTGYYIHWVRQAPGQGLEWMGWINPNSGGTNYAQKFQGRVTMTRDTSISTAYMELSGLRSDDPAVYYCARDMNILATVPFDIWGQGTLVTVSSGGGGSGGGGSGGGGSDIQLTQSPSSLSASVGDRVTITCRASQSISSYLNWYQQKPGKAPKLLIYAASSLQSGVPSRFSGSGSGTDFTLTVNSLQPEDFATYYCQQGDSVPLTFGGGTKVEIK

SEQ ID NO: 256 - protein, 121 aa, synthetic construct
  REGION 1..121: note = source = /note="Description of Artificial Sequence: Synthetic polypeptide"
QVQLVQSGAEVKKPGASVKVSCKASGYIFTGYYIHWVRQAPGQGLEWMGWINPNSGGTNYAQKFQGRVTMTRDTSISTAYMELSGLRSDDPAVYYCARDMNILATVPFDIWGQGTLVTVSS

SEQ ID NO: 257 - protein, 107 aa, synthetic construct
  REGION 1..107: note = source = /note="Description of Artificial Sequence: Synthetic polypeptide"
DIQLTQSPSSLSASVGDRVTITCRASQSISSYLNWYQQKPGKAPKLLIYAASSLQSGVPSRFSGSGSGTDFTLTVNSLQPEDFATYYCQQGDSVPLTFGGGTKVEIK

SEQ ID NO: 258 - DNA, 1467 bp, synthetic construct
  misc_feature 1..1467: note = source = /note="Description of Artificial Sequence: Synthetic polynucleotide"
  source 1..1467: mol_type = other DNA
atggccctccctgtcaccgccctgctgcttccgctggctcttctgctccacgccgctcggccccaagtccaactccaacagtcaggcgcagaagtgaaaaagagcggtgcatcggtgaaagtgtcatgcaaagcctcgggctacaccttcactgactactatatgcactggctgcggcaggcaccgggacagggacttgagtggatgggatggatcaacccgaattcaggggacactaactacgcgcagaagttccaggggagagtgaccctgacgagggacacctcaatttcgaccgtctacatggaattgtcgcgcctgagatcggacgatactgctgtgtactactgtgcccgcgacatgaacatcctcgcgactgtgccttttgatatctggggacaggggactatggtcaccgtttcctccgcttccggtggcggaggctcgggaggccgggcctccggtggaggaggcagcgacatccagatgactcagagcccttcctcgctgagcgcctcagtgggagatcgcgtgaccatcacttgccgggccagccagtccatttcgtcctacctcaattggtaccagcagaagccgggaaaggcgcccaagctcttgatctacgctgcgagctccctgcaaagcggggtgccgagccgattctcgggttccggctcgggaaccgacttcactctgaccatctcatccctgcaaccagaggactttgccacctactactgccaacaaggagattctgtcccactgacgttcggcggaggaaccaaggtcgaaatcaagaccactaccccagcaccgaggccacccaccccggctcctaccatcgcctcccagcctctgtccctgcgtccggaggcatgtagacccgcagctggtggggccgtgcatacccggggtcttgacttcgcctgcgatatctacatttgggcccctctggctggtacttgcggggtcctgctgctttcactcgtgatcactctttactgtaagcgcggtcggaagaagctgctgtacatctttaagcaacccttcatgaggcctgtgcagactactcaagaggaggacggctgttcatgccggttcccagaggaggaggaaggcggctgcgaactgcgcgtgaaattcagccgcagcgcagatgctccagcctacaagcaggggcagaaccagctctacaacgaactcaatcttggtcggagagaggagtacgacgtgctggacaagcggagaggacgggacccagaaatgggcgggaagccgcgcagaaagaatccccaagagggcctgtacaacgagctccaaaaggataagatggcagaagcctatagcgagattggtatgaaaggggaacgcagaagaggcaaaggccacgacggactgtaccagggactcagcaccgccaccaaggacacctatgacgctcttcacatgcaggccctgccgcctcgg

SEQ ID NO: 259 - protein, 336 aa, synthetic construct
  REGION 1..336: note = source = /note="Description of Artificial Sequence: Synthetic polypeptide"
MALPVTALLLPLALLLHAARPQVQLQQSGAEVKKSGASVKVSCKASGYTFTDYYMHWLRQAPGQGLEWMGWINPNSGDTNYAQKFQGRVTLTRDTSISTVYMELSRLRSDDTAVYYCARDMNILATVPFDIWGQGTMVTVSSASGGGGSGGRASGGGGSDIQMTQSPSSLSASVGDRVTITCRASQSISSYLNWYQQKPGKAPKLLIYAASSLQSGVPSRFSGSGSGTDFTLTISSLQPEDFATYYCQQGDSVPLTFGGGTKVEIKTTTPAPRPPTPAPTIASQPLSLRPEACRPAAGGAVHTRGLDFACDIYIWAPLAGTCGVLLLSLVITLYCK

SEQ ID NO: 260 - protein, 266 aa, synthetic construct
  REGION 1..266: note = source = /note="Description of Artificial Sequence: Synthetic polypeptide"
MALPVTALLLPLALLLHAARPQVQLQQSGAEVKKSGASVKVSCKASGYTFTDYYMHWLRQAPGQGLEWMGWINPNSGDTNYAQKFQGRVTLTRDTSISTVYMELSRLRSDDTAVYYCARDMNILATVPFDIWGQGTMVTVSSASGGGGSGGRASGGGGSDIQMTQSPSSLSASVGDRVTITCRASQSISSYLNWYQQKPGKAPKLLIYAASSLQSGVPSRFSGSGSGTDFTLTISSLQPEDFATYYCQQGDSVPLTFGGGTKVEIK

SEQ ID NO: 261 - protein, 121 aa, synthetic construct
  REGION 1..121: note = source = /note="Description of Artificial Sequence: Synthetic polypeptide"
QVQLQQSGAEVKKSGASVKVSCKASGYTFTDYYMHWLRQAPGQGLEWMGWINPNSGDTNYAQKFQGRVTLTRDTSISTVYMELSRLRSDDTAVYYCARDMNILATVPFDIWGQGTMVTVSS

SEQ ID NO: 262 - protein, 107 aa, synthetic construct
  REGION 1..107: note = source = /note="Description of Artificial Sequence: Synthetic polypeptide"
DIQMTQSPSSLSASVGDRVTITCRASQSISSYLNWYQQKPGKAPKLLIYAASSLQSGVPSRFSGSGSGTDFTLTISSLQPEDFATYYCQQGDSVPLTFGGGTKVEIK

SEQ ID NO: 263 - DNA, 1461 bp, synthetic construct
  misc_feature 1..1461: note = source = /note="Description of Artificial Sequence: Synthetic polynucleotide"
  source 1..1461: mol_type = other DNA
atggccctccctgtcaccgccctgctgcttccgctggctcttctgctccacgccgctcggccccaagtccaactcgtccagtcaggagcggaagtcaagaagcccggagcgtcagtcaaagtgtcatgcaaagcctcgggctacactttcactgggtactacatgcactgggtgcgccaggctccaggacagggactggaatggatgggatggatcaacccgaactccggtggcaccaattacgcccagaagttccaggggagggtgaccatgactcgcgacacgtcgatcagcaccgcatacatggagctgtcaagactccggtccgacgatactgccgtgtactactgcgcacgggacatgaacattctggccaccgtgccttttgacatctggggtcagggaactatggttaccgtgtcctctggtggaggcggctccggcggggggggaagcggaggcggtggaagcgacattcagatgacccagtcgccttcatccctttcggcgagcgtgggagatcgcgtcactatcacttgtcgggcctcgcagtccatctccacctacctcaattggtaccagcagaagccaggaaaagcaccgaatctgctgatctacgccgcgttttccttgcaatcgggagtgccaagcagattcagcggatcgggatcaggcactgatttcaccctcaccatcaactcgctgcaaccggaggatttcgctacgtactattgccaacaaggagacagcgtgccgctcaccttcggcggagggactaagctggaaatcaagaccactaccccagcaccgaggccacccaccccggctcctaccatcgcctcccagcctctgtccctgcgtccggaggcatgtagacccgcagctggtggggccgtgcatacccggggtcttgacttcgcctgcgatatctacatttgggcccctctggctggtacttgcggggtcctgctgctttcactcgtgatcactctttactgtaagcgcggtcggaagaagctgctgtacatctttaagcaacccttcatgaggcctgtgcagactactcaagaggaggacggctgttcatgccggttcccagaggaggaggaaggcggctgcgaactgcgcgtgaaattcagccgcagcgcagatgctccagcctacaagcaggggcagaaccagctctacaacgaactcaatcttggtcggagagaggagtacgacgtgctggacaagcggagaggacgggacccagaaatgggcgggaagccgcgcagaaagaatccccaagagggcctgtacaacgagctccaaaaggataagatggcagaagcctatagcgagattggtatgaaaggggaacgcagaagaggcaaaggccacgacggactgtaccagggactcagcaccgccaccaaggacacctatgacgctcttcacatgcaggccctgccgcctcgg

SEQ ID NO: 264 - protein, 487 aa, synthetic construct
  REGION 1..487: note = source = /note="Description of Artificial Sequence: Synthetic polypeptide"
MALPVTALLLPLALLLHAARPQVQLVQSGAEVKKPGASVKVSCKASGYTFTGYYMHWVRQAPGQGLEWMGWINPNSGGTNYAQKFQGRVTMTRDTSISTAYMELSRLRSDDTAVYYCARDMNILATVPFDIWGQGTMVTVSSGGGGSGGGGSGGGGSDIQMTQSPSSLSASVGDRVTITCRASQSISTYLNWYQQKPGKAPNLLIYAAFSLQSGVPSRFSGSGSGTDFTLTINSLQPEDFATYYCQQGDSVPLTFGGGTKLEIKTTTPAPRPPTPAPTIASQPLSLRPEACRPAAGGAVHTRGLDFACDIYIWAPLAGTCGVLLLSLVITLYCKRGRKKLLYIFKQPFMRPVQTTQEEDGCSCRFPEEEEGGCELRVKFSRSADAPAYKQGQNQLYNELNLGRREEYDVLDKRRGRDPEMGGKPRRKNPQEGLYNELQKDKMAEAYSEIGMKGERRRGKGHDGLYQGLSTATKDTYDALHMQALPPR

SEQ ID NO: 265 - protein, 264 aa, synthetic construct
  REGION 1..264: note = source = /note="Description of Artificial Sequence: Synthetic polypeptide"
MALPVTALLLPLALLLHAARPQVQLVQSGAEVKKPGASVKVSCKASGYTFTGYYMHWVRQAPGQGLEWMGWINPNSGGTNYAQKFQGRVTMTRDTSISTAYMELSRLRSDDTAVYYCARDMNILATVPFDIWGQGTMVTVSSGGGGSGGGGSGGGGSDIQMTQSPSSLSASVGDRVTITCRASQSISTYLNWYQQKPGKAPNLLIYAAFSLQSGVPSRFSGSGSGTDFTLTINSLQPEDFATYYCQQGDSVPLTFGGGTKLEIK

SEQ ID NO: 266 - protein, 121 aa, synthetic construct
  REGION 1..121: note = source = /note="Description of Artificial Sequence: Synthetic polypeptide"
QVQLVQSGAEVKKPGASVKVSCKASGYTFTGYYMHWVRQAPGQGLEWMGWINPNSGGTNYAQKFQGRVTMTRDTSISTAYMELSRLRSDDTAVYYCARDMNILATVPFDIWGQGTMVTVSS

SEQ ID NO: 267 - protein, 107 aa, synthetic construct
  REGION 1..107: note = source = /note="Description of Artificial Sequence: Synthetic polypeptide"
DIQMTQSPSSLSASVGDRVTITCRASQSISTYLNWYQQKPGKAPNLLIYAAFSLQSGVPSRFSGSGSGTDFTLTINSLQPEDFATYYCQQGDSVPLTFGGGTKLEIK

SEQ ID NO: 268 - DNA, 1458 bp, synthetic construct
  misc_feature 1..1458: note = source = /note="Description of Artificial Sequence: Synthetic polynucleotide"
  source 1..1458: mol_type = other DNA
atggccctccctgtcaccgccctgctgcttccgctggctcttctgctccacgccgctcggccccaagtgcagctggtccagtcgggagccgaagtcaagaagcccggcgctagcgtgaaagtgtcctgcaaagcctccgggtacacattcacctcctactggatgaattgggtcagacaggcgcccggccagggactcgagtggatgggaaggattgatccttacgactccgaaacccattacaaccagaagttcaaggaccgcgtgaccatgactgtggataagtccacttccaccgcttacatggagctgtccagcctgcgctccgaggataccgcagtgtactactgcgcccggggaaactgggacgactattggggacagggaactaccgtgaccgtgtcaagcgggggtggcggtagcggaggagggggctccggcggcggcggctcagggggcggaggaagcgacgtgcagctcacccagtcgccctcatttctgtcggcctcagtgggagacagagtgaccattacttgtcgggcctccaagagcatctccaaggacctggcctggtatcagcagaagccaggaaaggcgcctaagttgctcatctactcggggtcgaccctgcaatctggcgtgccgtcccggttctccggttcgggaagcggtaccgaattcacccttactatctcctccctgcaaccggaggacttcgccacctactactgccaacagcacaacaagtacccgtacactttcgggggtggcacgaaggtcgaaatcaagaccactaccccagcaccgaggccacccaccccggctcctaccatcgcctcccagcctctgtccctgcgtccggaggcatgtagacccgcagctggtggggccgtgcatacccggggtcttgacttcgcctgcgatatctacatttgggcccctctggctggtacttgcggggtcctgctgctttcactcgtgatcactctttactgtaagcgcggtcggaagaagctgctgtacatctttaagcaacccttcatgaggcctgtgcagactactcaagaggaggacggctgttcatgccggttcccagaggaggaggaaggcggctgcgaactgcgcgtgaaattcagccgcagcgcagatgctccagcctacaagcaggggcagaaccagctctacaacgaactcaatcttggtcggagagaggagtacgacgtgctggacaagcggagaggacgggacccagaaatgggcgggaagccgcgcagaaagaatccccaagagggcctgtacaacgagctccaaaaggataagatggcagaagcctatagcgagattggtatgaaaggggaacgcagaagaggcaaaggccacgacggactgtaccagggactcagcaccgccaccaaggacacctatgacgctcttcacatgcaggccctgccgcctcgg

SEQ ID NO: 269 - protein, 486 aa, synthetic construct
  REGION 1..486: note = source = /note="Description of Artificial Sequence: Synthetic polypeptide"
MALPVTALLLPLALLLHAARPQVQLVQSGAEVKKPGASVKVSCKASGYTFTSYWMNWVRQAPGQGLEWMGRIDPYDSETHYNQKFKDRVTMTVDKSTSTAYMELSSLRSEDTAVYYCARGNWDDYWGQGTTVTVSSGGGGSGGGGSGGGGSGGGGSDVQLTQSPSFLSASVGDRVTITCRASKSISKDLAWYQQKPGKAPKLLIYSGSTLQSGVPSRFSGSGSGTEFTLTISSLQPEDFATYYCQQHNKYPYTFGGGTKVEIKTTTPAPRPPTPAPTIASQPLSLRPEACRPAAGGAVHTRGLDFACDIYIWAPLAGTCGVLLLSLVITLYCKRGRKKLLYIFKQPFMRPVQTTQEEDGCSCRFPEEEEGGCELRVKFSRSADAPAYKQGQNQLYNELNLGRREEYDVLDKRRGRDPEMGGKPRRKNPQEGLYNELQKDKMAEAYSEIGMKGERRRGKGHDGLYQGLSTATKDTYDALHMQALPPR

SEQ ID NO: 270 - protein, 263 aa, synthetic construct
  REGION 1..263: note = source = /note="Description of Artificial Sequence: Synthetic polypeptide"
MALPVTALLLPLALLLHAARPQVQLVQSGAEVKKPGASVKVSCKASGYTFTSYWMNWVRQAPGQGLEWMGRIDPYDSETHYNQKFKDRVTMTVDKSTSTAYMELSSLRSEDTAVYYCARGNWDDYWGQGTTVTVSSGGGGSGGGGSGGGGSGGGGSDVQLTQSPSFLSASVGDRVTITCRASKSISKDLAWYQQKPGKAPKLLIYSGSTLQSGVPSRFSGSGSGTEFTLTISSLQPEDFATYYCQQHNKYPYTFGGGTKVEIK

SEQ ID NO: 271 - protein, 115 aa, synthetic construct
  REGION 1..115: note = source = /note="Description of Artificial Sequence: Synthetic polypeptide"
QVQLVQSGAEVKKPGASVKVSCKASGYTFTSYWMNWVRQAPGQGLEWMGRIDPYDSETHYNQKFKDRVTMTVDKSTSTAYMELSSLRSEDTAVYYCARGNWDDYWGQGTTVTVSS

SEQ ID NO: 272 - protein, 107 aa, synthetic construct
  REGION 1..107: note = source = /note="Description of Artificial Sequence: Synthetic polypeptide"
DVQLTQSPSFLSASVGDRVTITCRASKSISKDLAWYQQKPGKAPKLLIYSGSTLQSGVPSRFSGSGSGTEFTLTISSLQPEDFATYYCQQHNKYPYTFGGGTKVEIK

SEQ ID NO: 273 - DNA, 1458 bp, synthetic construct
  misc_feature 1..1458: note = source = /note="Description of Artificial Sequence: Synthetic polynucleotide"
  source 1..1458: mol_type = other DNA
atggccctccctgtcaccgccctgctgcttccgctggctcttctgctccacgccgctcggccccaagtgcagctggtccagtcgggagccgaagtcaagaagcccggcgctagcgtgaaagtgtcctgcaaagcctccgggtacacattcacctcctactggatgaattgggtcagacaggcgcccggccagggactcgagtggatgggaaggattgatccttacgactccgaaacccattacaaccagaagttcaaggaccgcgtgaccatgactgtggataagtccacttccaccgcttacatggagctgtccagcctgcgctccgaggataccgcagtgtactactgcgcccggggaaactgggacgactattggggacagggaactaccgtgaccgtgtcaagcgggggtggcggtagcggaggagggggctccggcggcggcggctcagggggcggaggaagcgaagtggtgctgacccagtcgcccgcaaccctctctctgtcgccgggagaacgcgccactctttcctgtcgggcgtccaagagcatctcaaaggacctcgcctggtaccagcagaagcctggtcaagccccgcggctgctgatctactccggctccacgctgcaatcaggaatcccagccagattttccggttcggggtcggggactgacttcaccttgaccattagctcgctggaacctgaggacttcgccgtgtattactgccagcagcacaacaagtacccgtacaccttcggaggcggtactaaggtcgagatcaagaccactaccccagcaccgaggccacccaccccggctcctaccatcgcctcccagcctctgtccctgcgtccggaggcatgtagacccgcagctggtggggccgtgcatacccggggtcttgacttcgcctgcgatatctacatttgggcccctctggctggtacttgcggggtcctgctgctttcactcgtgatcactctttactgtaagcgcggtcggaagaagctgctgtacatctttaagcaacccttcatgaggcctgtgcagactactcaagaggaggacggctgttcatgccggttcccagaggaggaggaaggcggctgcgaactgcgcgtgaaattcagccgcagcgcagatgctccagcctacaagcaggggcagaaccagctctacaacgaactcaatcttggtcggagagaggagtacgacgtgctggacaagcggagaggacgggacccagaaatgggcgggaagccgcgcagaaagaatccccaagagggcctgtacaacgagctccaaaaggataagatggcagaagcctatagcgagattggtatgaaaggggaacgcagaagaggcaaaggccacgacggactgtaccagggactcagcaccgccaccaaggacacctatgacgctcttcacatgcaggccctgccgcctcgg

SEQ ID NO: 274 - protein, 486 aa, synthetic construct
  REGION 1..486: note = source = /note="Description of Artificial Sequence: Synthetic polypeptide"
MALPVTALLLPLALLLHAARPQVQLVQSGAEVKKPGASVKVSCKASGYTFTSYWMNWVRQAPGQGLEWMGRIDPYDSETHYNQKFKDRVTMTVDKSTSTAYMELSSLRSEDTAVYYCARGNWDDYWGQGTTVTVSSGGGGSGGGGSGGGGSGGGGSEVVLTQSPATLSLSPGERATLSCRASKSISKDLAWYQQKPGQAPRLLIYSGSTLQSGIPARFSGSGSGTDFTLTISSLEPEDFAVYYCQQHNKYPYTFGGGTKVEIKTTTPAPRPPTPAPTIASQPLSLRPEACRPAAGGAVHTRGLDFACDIYIWAPLAGTCGVLLLSLVITLYCKRGRKKLLYIFKQPFMRPVQTTQEEDGCSCRFPEEEEGGCELRVKFSRSADAPAYKQGQNQLYNELNLGRREEYDVLDKRRGRDPEMGGKPRRKNPQEGLYNELQKDKMAEAYSEIGMKGERRRGKGHDGLYQGLSTATKDTYDALHMQALPPR

SEQ ID NO: 275 - protein, 263 aa, synthetic construct
  REGION 1..263: note = source = /note="Description of Artificial Sequence: Synthetic polypeptide"
MALPVTALLLPLALLLHAARPQVQLVQSGAEVKKPGASVKVSCKASGYTFTSYWMNWVRQAPGQGLEWMGRIDPYDSETHYNQKFKDRVTMTVDKSTSTAYMELSSLRSEDTAVYYCARGNWDDYWGQGTTVTVSSGGGGSGGGGSGGGGSGGGGSEVVLTQSPATLSLSPGERATLSCRASKSISKDLAWYQQKPGQAPRLLIYSGSTLQSGIPARFSGSGSGTDFTLTISSLEPEDFAVYYCQQHNKYPYTFGGGTKVEIK

SEQ ID NO: 276 - protein, 107 aa, synthetic construct
  REGION 1..107: note = source = /note="Description of Artificial Sequence: Synthetic polypeptide"
EVVLTQSPATLSLSPGERATLSCRASKSISKDLAWYQQKPGQAPRLLIYSGSTLQSGIPARFSGSGSGTDFTLTISSLEPEDFAVYYCQQHNKYPYTFGGGTKVEIK

SEQ ID NO: 277 - DNA, 1458 bp, synthetic construct
  misc_feature 1..1458: note = source = /note="Description of Artificial Sequence: Synthetic polynucleotide"
  source 1..1458: mol_type = other DNA
atggccctccctgtcaccgccctgctgcttccgctggctcttctgctccacgccgctcggccccaagtgcagctggtccagtcgggagccgaagtcaagaagcccggcgctagcgtgaaagtgtcctgcaaagcctccgggtacacattcacctcctactggatgaattgggtcagacaggcgcccggccagggactcgagtggatgggaaggattgatccttacgactccgaaacccattacaaccagaagttcaaggaccgcgtgaccatgactgtggataagtccacttccaccgcttacatggagctgtccagcctgcgctccgaggataccgcagtgtactactgcgcccggggaaactgggacgactattggggacagggaactaccgtgaccgtgtcaagcgggggtggcggtagcggaggagggggctccggcggcggcggctcagggggcggaggaagcgacgtcgtgatgacccagtcaccggcattcctgtccgtgactcccggagaaaaggtcacgattacttgccgggcgtccaagagcatctccaaggacctcgcctggtaccaacagaagccggaccaggcccctaagctgttgatctactcggggtccacccttcaatcgggagtgccatcgcggtttagcggttcgggttctgggaccgacttcactttcaccatctcctcactggaagccgaggatgccgccacttactactgtcagcagcacaacaagtatccgtacaccttcggaggcggtaccaaagtggagatcaagaccactaccccagcaccgaggccacccaccccggctcctaccatcgcctcccagcctctgtccctgcgtccggaggcatgtagacccgcagctggtggggccgtgcatacccggggtcttgacttcgcctgcgatatctacatttgggcccctctggctggtacttgcggggtcctgctgctttcactcgtgatcactctttactgtaagcgcggtcggaagaagctgctgtacatctttaagcaacccttcatgaggcctgtgcagactactcaagaggaggacggctgttcatgccggttcccagaggaggaggaaggcggctgcgaactgcgcgtgaaattcagccgcagcgcagatgctccagcctacaagcaggggcagaaccagctctacaacgaactcaatcttggtcggagagaggagtacgacgtgctggacaagcggagaggacgggacccagaaatgggcgggaagccgcgcagaaagaatccccaagagggcctgtacaacgagctccaaaaggataagatggcagaagcctatagcgagattggtatgaaaggggaacgcagaagaggcaaaggccacgacggactgtaccagggactcagcaccgccaccaaggacacctatgacgctcttcacatgcaggccctgccgcctcgg

SEQ ID NO: 278 - protein, 486 aa, synthetic construct
  REGION 1..486: note = source = /note="Description of Artificial Sequence: Synthetic polypeptide"
MALPVTALLLPLALLLHAARPQVQLVQSGAEVKKPGASVKVSCKASGYTFTSYWMNWVRQAPGQGLEWMGRIDPYDSETHYNQKFKDRVTMTVDKSTSTAYMELSSLRSEDTAVYYCARGNWDDYWGQGTTVTVSSGGGGSGGGGSGGGGSGGGGSDVVMTQSPAFLSVTPGEKVTITCRASKSISKDLAWYQQKPDQAPKLLIYSGSTLQSGVPSRFSGSGSGTDFTFTISSLEAEDAATYYCQQHNKYPYTFGGGTKVEIKTTTPAPRPPTPAPTIASQPLSLRPEACRPAAGGAVHTRGLDFACDIYIWAPLAGTCGVLLLSLVITLYCKRGRKKLLYIFKQPFMRPVQTTQEEDGCSCRFPEEEEGGCELRVKFSRSADAPAYKQGQNQLYNELNLGRREEYDVLDKRRGRDPEMGGKPRRKNPQEGLYNELQKDKMAEAYSEIGMKGERRRGKGHDGLYQGLSTATKDTYDALHMQALPPR

SEQ ID NO: 279 - protein, 263 aa, synthetic construct
  REGION 1..263: note = source = /note="Description of Artificial Sequence: Synthetic polypeptide"
MALPVTALLLPLALLLHAARPQVQLVQSGAEVKKPGASVKVSCKASGYTFTSYWMNWVRQAPGQGLEWMGRIDPYDSETHYNQKFKDRVTMTVDKSTSTAYMELSSLRSEDTAVYYCARGNWDDYWGQGTTVTVSSGGGGSGGGGSGGGGSGGGGSDVVMTQSPAFLSVTPGEKVTITCRASKSISKDLAWYQQKPDQAPKLLIYSGSTLQSGVPSRFSGSGSGTDFTFTISSLEAEDAATYYCQQHNKYPYTFGGGTKVEIK

SEQ ID NO: 280 - protein, 107 aa, synthetic construct
  REGION 1..107: note = source = /note="Description of Artificial Sequence: Synthetic polypeptide"
DVVMTQSPAFLSVTPGEKVTITCRASKSISKDLAWYQQKPDQAPKLLIYSGSTLQSGVPSRFSGSGSGTDFTFTISSLEAEDAATYYCQQHNKYPYTFGGGTKVEIK

SEQ ID NO: 281 - DNA, 1458 bp, synthetic construct
  misc_feature 1..1458: note = source = /note="Description of Artificial Sequence: Synthetic polynucleotide"
  source 1..1458: mol_type = other DNA
atggccctccctgtcaccgccctgctgcttccgctggctcttctgctccacgccgctcggccccaagtgcagctggtccagtcgggagccgaagtcaagaagcccggcgctagcgtgaaagtgtcctgcaaagcctccgggtacacattcacctcctactggatgaattgggtcagacaggcgcccggccagggactcgagtggatgggaaggattgatccttacgactccgaaacccattacaaccagaagttcaaggaccgcgtgaccatgactgtggataagtccacttccaccgcttacatggagctgtccagcctgcgctccgaggataccgcagtgtactactgcgcccggggaaactgggacgactattggggacagggaactaccgtgaccgtgtcaagcgggggtggcggtagcggaggagggggctccggcggcggcggctcagggggcggaggaagcgacgtggtcatgactcagtccccggactcactcgcggtgtcgcttggagagagagcgaccatcaactgtcgggcctcaaagagcatcagcaaggacctggcctggtaccagcagaagccgggacagccgccaaagctgctgatctactccgggtccaccttgcaatctggtgtccctgaccggttctccggttccgggtcgggtaccgacttcacgctcactatttcgtcgctgcaagccgaagatgtggccgtgtactattgccaacagcacaacaagtacccctacacttttggcggaggcaccaaggtggaaatcaagaccactaccccagcaccgaggccacccaccccggctcctaccatcgcctcccagcctctgtccctgcgtccggaggcatgtagacccgcagctggtggggccgtgcatacccggggtcttgacttcgcctgcgatatctacatttgggcccctctggctggtacttgcggggtcctgctgctttcactcgtgatcactctttactgtaagcgcggtcggaagaagctgctgtacatctttaagcaacccttcatgaggcctgtgcagactactcaagaggaggacggctgttcatgccggttcccagaggaggaggaaggcggctgcgaactgcgcgtgaaattcagccgcagcgcagatgctccagcctacaagcaggggcagaaccagctctacaacgaactcaatcttggtcggagagaggagtacgacgtgctggacaagcggagaggacgggacccagaaatgggcgggaagccgcgcagaaagaatccccaagagggcctgtacaacgagctccaaaaggataagatggcagaagcctatagcgagattggtatgaaaggggaacgcagaagaggcaaaggccacgacggactgtaccagggactcagcaccgccaccaaggacacctatgacgctcttcacatgcaggccctgccgcctcgg

SEQ ID NO: 282 - protein, 486 aa, synthetic construct
  REGION 1..486: note = source = /note="Description of Artificial Sequence: Synthetic polypeptide"
MALPVTALLLPLALLLHAARPQVQLVQSGAEVKKPGASVKVSCKASGYTFTSYWMNWVRQAPGQGLEWMGRIDPYDSETHYNQKFKDRVTMTVDKSTSTAYMELSSLRSEDTAVYYCARGNWDDYWGQGTTVTVSSGGGGSGGGGSGGGGSGGGGSDVVMTQSPDSLAVSLGERATINCRASKSISKDLAWYQQKPGQPPKLLIYSGSTLQSGVPDRFSGSGSGTDFTLTISSLQAEDVAVYYCQQHNKYPYTFGGGTKVEIKTTTPAPRPPTPAPTIASQPLSLRPEACRPAAGGAVHTRGLDFACDIYIWAPLAGTCGVLLLSLVITLYCKRGRKKLLYIFKQPFMRPVQTTQEEDGCSCRFPEEEEGGCELRVKFSRSADAPAYKQGQNQLYNELNLGRREEYDVLDKRRGRDPEMGGKPRRKNPQEGLYNELQKDKMAEAYSEIGMKGERRRGKGHDGLYQGLSTATKDTYDALHMQALPPR

SEQ ID NO: 283 - protein, 263 aa, synthetic construct
  REGION 1..263: note = source = /note="Description of Artificial Sequence: Synthetic polypeptide"
MALPVTALLLPLALLLHAARPQVQLVQSGAEVKKPGASVKVSCKASGYTFTSYWMNWVRQAPGQGLEWMGRIDPYDSETHYNQKFKDRVTMTVDKSTSTAYMELSSLRSEDTAVYYCARGNWDDYWGQGTTVTVSSGGGGSGGGGSGGGGSGGGGSDVVMTQSPDSLAVSLGERATINCRASKSISKDLAWYQQKPGQPPKLLIYSGSTLQSGVPDRFSGSGSGTDFTLTISSLQAEDVAVYYCQQHNKYPYTFGGGTKVEIK

SEQ ID NO: 284 - protein, 107 aa, synthetic construct
  REGION 1..107: note = source = /note="Description of Artificial Sequence: Synthetic polypeptide"
DVVMTQSPDSLAVSLGERATINCRASKSISKDLAWYQQKPGQPPKLLIYSGSTLQSGVPDRFSGSGSGTDFTLTISSLQAEDVAVYYCQQHNKYPYTFGGGTKVEIK

SEQ ID NO: 285 - DNA, 1458 bp, synthetic construct
  misc_feature 1..1458: note = source = /note="Description of Artificial Sequence: Synthetic polynucleotide"
  source 1..1458: mol_type = other DNA
atggccctccctgtcaccgccctgctgcttccgctggctcttctgctccacgccgctcggcccgacgtgcagctcacccagtcgccctcatttctgtcggcctcagtgggagacagagtgaccattacttgtcgggcctccaagagcatctccaaggacctggcctggtatcagcagaagccaggaaaggcgcctaagttgctcatctactcggggtcgaccctgcaatctggcgtgccgtcccggttctccggttcgggaagcggtaccgaattcacccttactatctcctccctgcaaccggaggacttcgccacctactactgccaacagcacaacaagtacccgtacactttcgggggtggcacgaaggtcgaaatcaaggggggtggcggtagcggaggagggggctccggcggcggcggctcagggggcggaggaagccaagtgcagctggtccagtcgggagccgaagtcaagaagcccggcgctagcgtgaaagtgtcctgcaaagcctccgggtacacattcacctcctactggatgaattgggtcagacaggcgcccggccagggactcgagtggatgggaaggattgatccttacgactccgaaacccattacaaccagaagttcaaggaccgcgtgaccatgactgtggataagtccacttccaccgcttacatggagctgtccagcctgcgctccgaggataccgcagtgtactactgcgcccggggaaactgggacgactattggggacagggaactaccgtgaccgtgtcaagcaccactaccccagcaccgaggccacccaccccggctcctaccatcgcctcccagcctctgtccctgcgtccggaggcatgtagacccgcagctggtggggccgtgcatacccggggtcttgacttcgcctgcgatatctacatttgggcccctctggctggtacttgcggggtcctgctgctttcactcgtgatcactctttactgtaagcgcggtcggaagaagctgctgtacatctttaagcaacccttcatgaggcctgtgcagactactcaagaggaggacggctgttcatgccggttcccagaggaggaggaaggcggctgcgaactgcgcgtgaaattcagccgcagcgcagatgctccagcctacaagcaggggcagaaccagctctacaacgaactcaatcttggtcggagagaggagtacgacgtgctggacaagcggagaggacgggacccagaaatgggcgggaagccgcgcagaaagaatccccaagagggcctgtacaacgagctccaaaaggataagatggcagaagcctatagcgagattggtatgaaaggggaacgcagaagaggcaaaggccacgacggactgtaccagggactcagcaccgccaccaaggacacctatgacgctcttcacatgcaggccctgccgcctcgg

SEQ ID NO: 286 - protein, 486 aa, synthetic construct
  REGION 1..486: note = source = /note="Description of Artificial Sequence: Synthetic polypeptide"
MALPVTALLLPLALLLHAARPDVQLTQSPSFLSASVGDRVTITCRASKSISKDLAWYQQKPGKAPKLLIYSGSTLQSGVPSRFSGSGSGTEFTLTISSLQPEDFATYYCQQHNKYPYTFGGGTKVEIKGGGGSGGGGSGGGGSGGGGSQVQLVQSGAEVKKPGASVKVSCKASGYTFTSYWMNWVRQAPGQGLEWMGRIDPYDSETHYNQKFKDRVTMTVDKSTSTAYMELSSLRSEDTAVYYCARGNWDDYWGQGTTVTVSSTTTPAPRPPTPAPTIASQPLSLRPEACRPAAGGAVHTRGLDFACDIYIWAPLAGTCGVLLLSLVITLYCKRGRKKLLYIFKQPFMRPVQTTQEEDGCSCRFPEEEEGGCELRVKFSRSADAPAYKQGQNQLYNELNLGRREEYDVLDKRRGRDPEMGGKPRRKNPQEGLYNELQKDKMAEAYSEIGMKGERRRGKGHDGLYQGLSTATKDTYDALHMQALPPR

SEQ ID NO: 287 - protein, 263 aa, synthetic construct
  REGION 1..263: note = source = /note="Description of Artificial Sequence: Synthetic polypeptide"
MALPVTALLLPLALLLHAARPDVQLTQSPSFLSASVGDRVTITCRASKSISKDLAWYQQKPGKAPKLLIYSGSTLQSGVPSRFSGSGSGTEFTLTISSLQPEDFATYYCQQHNKYPYTFGGGTKVEIKGGGGSGGGGSGGGGSGGGGSQVQLVQSGAEVKKPGASVKVSCKASGYTFTSYWMNWVRQAPGQGLEWMGRIDPYDSETHYNQKFKDRVTMTVDKSTSTAYMELSSLRSEDTAVYYCARGNWDDYWGQGTTVTVSS

SEQ ID NO: 288 - DNA, 1458 bp, synthetic construct
  misc_feature 1..1458: note = source = /note="Description of Artificial Sequence: Synthetic polynucleotide"
  source 1..1458: mol_type = other DNA
atggccctccctgtcaccgccctgctgcttccgctggctcttctgctccacgccgctcggcccgaagtggtgctgacccagtcgcccgcaaccctctctctgtcgccgggagaacgcgccactctttcctgtcgggcgtccaagagcatctcaaaggacctcgcctggtaccagcagaagcctggtcaagccccgcggctgctgatctactccggctccacgctgcaatcaggaatcccagccagattttccggttcggggtcggggactgacttcaccttgaccattagctcgctggaacctgaggacttcgccgtgtattactgccagcagcacaacaagtacccgtacaccttcggaggcggtactaaggtcgagatcaaggggggtggcggtagcggaggagggggctccggcggcggcggctcagggggcggaggaagccaagtgcagctggtccagtcgggagccgaagtcaagaagcccggcgctagcgtgaaagtgtcctgcaaagcctccgggtacacattcacctcctactggatgaattgggtcagacaggcgcccggccagggactcgagtggatgggaaggattgatccttacgactccgaaacccattacaaccagaagttcaaggaccgcgtgaccatgactgtggataagtccacttccaccgcttacatggagctgtccagcctgcgctccgaggataccgcagtgtactactgcgcccggggaaactgggacgactattggggacagggaactaccgtgaccgtgtcaagcaccactaccccagcaccgaggccacccaccccggctcctaccatcgcctcccagcctctgtccctgcgtccggaggcatgtagacccgcagctggtggggccgtgcatacccggggtcttgacttcgcctgcgatatctacatttgggcccctctggctggtacttgcggggtcctgctgctttcactcgtgatcactctttactgtaagcgcggtcggaagaagctgctgtacatctttaagcaacccttcatgaggcctgtgcagactactcaagaggaggacggctgttcatgccggttcccagaggaggaggaaggcggctgcgaactgcgcgtgaaattcagccgcagcgcagatgctccagcctacaagcaggggcagaaccagctctacaacgaactcaatcttggtcggagagaggagtacgacgtgctggacaagcggagaggacgggacccagaaatgggcgggaagccgcgcagaaagaatccccaagagggcctgtacaacgagctccaaaaggataagatggcagaagcctatagcgagattggtatgaaaggggaacgcagaagaggcaaaggccacgacggactgtaccagggactcagcaccgccaccaaggacacctatgacgctcttcacatgcaggccctgccgcctcgg

SEQ ID NO: 289 - protein, 486 aa, synthetic construct
  REGION 1..486: note = source = /note="Description of Artificial Sequence: Synthetic polypeptide"
MALPVTALLLPLALLLHAARPEVVLTQSPATLSLSPGERATLSCRASKSISKDLAWYQQKPGQAPRLLIYSGSTLQSGIPARFSGSGSGTDFTLTISSLEPEDFAVYYCQQHNKYPYTFGGGTKVEIKGGGGSGGGGSGGGGSGGGGSQVQLVQSGAEVKKPGASVKVSCKASGYTFTSYWMNWVRQAPGQGLEWMGRIDPYDSETHYNQKFKDRVTMTVDKSTSTAYMELSSLRSEDTAVYYCARGNWDDYWGQGTTVTVSSTTTPAPRPPTPAPTIASQPLSLRPEACRPAAGGAVHTRGLDFACDIYIWAPLAGTCGVLLLSLVITLYCKRGRKKLLYIFKQPFMRPVQTTQEEDGCSCRFPEEEEGGCELRVKFSRSADAPAYKQGQNQLYNELNLGRREEYDVLDKRRGRDPEMGGKPRRKNPQEGLYNELQKDKMAEAYSEIGMKGERRRGKGHDGLYQGLSTATKDTYDALHMQALPPR

SEQ ID NO: 290 - protein, 263 aa, synthetic construct
  REGION 1..263: note = source = /note="Description of Artificial Sequence: Synthetic polypeptide"
MALPVTALLLPLALLLHAARPEVVLTQSPATLSLSPGERATLSCRASKSISKDLAWYQQKPGQAPRLLIYSGSTLQSGIPARFSGSGSGTDFTLTISSLEPEDFAVYYCQQHNKYPYTFGGGTKVEIKGGGGSGGGGSGGGGSGGGGSQVQLVQSGAEVKKPGASVKVSCKASGYTFTSYWMNWVRQAPGQGLEWMGRIDPYDSETHYNQKFKDRVTMTVDKSTSTAYMELSSLRSEDTAVYYCARGNWDDYWGQGTTVTVSS

SEQ ID NO: 291 - DNA, 1458 bp, synthetic construct
  misc_feature 1..1458: note = source = /note="Description of Artificial Sequence: Synthetic polynucleotide"
  source 1..1458: mol_type = other DNA
atggccctccctgtcaccgccctgctgcttccgctggctcttctgctccacgccgctcggcccgacgtcgtgatgacccagtcaccggcattcctgtccgtgactcccggagaaaaggtcacgattacttgccgggcgtccaagagcatctccaaggacctcgcctggtaccaacagaagccggaccaggcccctaagctgttgatctactcggggtccacccttcaatcgggagtgccatcgcggtttagcggttcgggttctgggaccgacttcactttcaccatctcctcactggaagccgaggatgccgccacttactactgtcagcagcacaacaagtatccgtacaccttcggaggcggtaccaaagtggagatcaaggggggtggcggtagcggaggagggggctccggcggcggcggctcagggggcggaggaagccaagtgcagctggtccagtcgggagccgaagtcaagaagcccggcgctagcgtgaaagtgtcctgcaaagcctccgggtacacattcacctcctactggatgaattgggtcagacaggcgcccggccagggactcgagtggatgggaaggattgatccttacgactccgaaacccattacaaccagaagttcaaggaccgcgtgaccatgactgtggataagtccacttccaccgcttacatggagctgtccagcctgcgctccgaggataccgcagtgtactactgcgcccggggaaactgggacgactattggggacagggaactaccgtgaccgtgtcaagcaccactaccccagcaccgaggccacccaccccggctcctaccatcgcctcccagcctctgtccctgcgtccggaggcatgtagacccgcagctggtggggccgtgcatacccggggtcttgacttcgcctgcgatatctacatttgggcccctctggctggtacttgcggggtcctgctgctttcactcgtgatcactctttactgtaagcgcggtcggaagaagctgctgtacatctttaagcaacccttcatgaggcctgtgcagactactcaagaggaggacggctgttcatgccggttcccagaggaggaggaaggcggctgcgaactgcgcgtgaaattcagccgcagcgcagatgctccagcctacaagcaggggcagaaccagctctacaacgaactcaatcttggtcggagagaggagtacgacgtgctggacaagcggagaggacgggacccagaaatgggcgggaagccgcgcagaaagaatccccaagagggcctgtacaacgagctccaaaaggataagatggcagaagcctatagcgagattggtatgaaaggggaacgcagaagaggcaaaggccacgacggactgtaccagggactcagcaccgccaccaaggacacctatgacgctcttcacatgcaggccctgccgcctcgg

SEQ ID NO: 292 - protein, 486 aa, synthetic construct
  REGION 1..486: note = source = /note="Description of Artificial Sequence: Synthetic polypeptide"
MALPVTALLLPLALLLHAARPDVVMTQSPAFLSVTPGEKVTITCRASKSISKDLAWYQQKPDQAPKLLIYSGSTLQSGVPSRFSGSGSGTDFTFTISSLEAEDAATYYCQQHNKYPYTFGGGTKVEIKGGGGSGGGGSGGGGSGGGGSQVQLVQSGAEVKKPGASVKVSCKASGYTFTSYWMNWVRQAPGQGLEWMGRIDPYDSETHYNQKFKDRVTMTVDKSTSTAYMELSSLRSEDTAVYYCARGNWDDYWGQGTTVTVSSTTTPAPRPPTPAPTIASQPLSLRPEACRPAAGGAVHTRGLDFACDIYIWAPLAGTCGVLLLSLVITLYCKRGRKKLLYIFKQPFMRPVQTTQEEDGCSCRFPEEEEGGCELRVKFSRSADAPAYKQGQNQLYNELNLGRREEYDVLDKRRGRDPEMGGKPRRKNPQEGLYNELQKDKMAEAYSEIGMKGERRRGKGHDGLYQGLSTATKDTYDALHMQALPPR

SEQ ID NO: 293 - protein, 263 aa, synthetic construct
  REGION 1..263: note = source = /note="Description of Artificial Sequence: Synthetic polypeptide"
MALPVTALLLPLALLLHAARPDVVMTQSPAFLSVTPGEKVTITCRASKSISKDLAWYQQKPDQAPKLLIYSGSTLQSGVPSRFSGSGSGTDFTFTISSLEAEDAATYYCQQHNKYPYTFGGGTKVEIKGGGGSGGGGSGGGGSGGGGSQVQLVQSGAEVKKPGASVKVSCKASGYTFTSYWMNWVRQAPGQGLEWMGRIDPYDSETHYNQKFKDRVTMTVDKSTSTAYMELSSLRSEDTAVYYCARGNWDDYWGQGTTVTVSS

SEQ ID NO: 294 - DNA, 1458 bp, synthetic construct
  misc_feature 1..1458: note = source = /note="Description of Artificial Sequence: Synthetic polynucleotide"
  source 1..1458: mol_type = other DNA
atggccctccctgtcaccgccctgctgcttccgctggctcttctgctccacgccgctcggcccgacgtggtcatgactcagtccccggactcactcgcggtgtcgcttggagagagagcgaccatcaactgtcgggcctcaaagagcatcagcaaggacctggcctggtaccagcagaagccgggacagccgccaaagctgctgatctactccgggtccaccttgcaatctggtgtccctgaccggttctccggttccgggtcgggtaccgacttcacgctcactatttcgtcgctgcaagccgaagatgtggccgtgtactattgccaacagcacaacaagtacccctacacttttggcggaggcaccaaggtggaaatcaaggggggtggcggtagcggaggagggggctccggcggcggcggctcagggggcggaggaagccaagtgcagctggtccagtcgggagccgaagtcaagaagcccggcgctagcgtgaaagtgtcctgcaaagcctccgggtacacattcacctcctactggatgaattgggtcagacaggcgcccggccagggactcgagtggatgggaaggattgatccttacgactccgaaacccattacaaccagaagttcaaggaccgcgtgaccatgactgtggataagtccacttccaccgcttacatggagctgtccagcctgcgctccgaggataccgcagtgtactactgcgcccggggaaactgggacgactattggggacagggaactaccgtgaccgtgtcaagcaccactaccccagcaccgaggccacccaccccggctcctaccatcgcctcccagcctctgtccctgcgtccggaggcatgtagacccgcagctggtggggccgtgcatacccggggtcttgacttcgcctgcgatatctacatttgggcccctctggctggtacttgcggggtcctgctgctttcactcgtgatcactctttactgtaagcgcggtcggaagaagctgctgtacatctttaagcaacccttcatgaggcctgtgcagactactcaagaggaggacggctgttcatgccggttcccagaggaggaggaaggcggctgcgaactgcgcgtgaaattcagccgcagcgcagatgctccagcctacaagcaggggcagaaccagctctacaacgaactcaatcttggtcggagagaggagtacgacgtgctggacaagcggagaggacgggacccagaaatgggcgggaagccgcgcagaaagaatccccaagagggcctgtacaacgagctccaaaaggataagatggcagaagcctatagcgagattggtatgaaaggggaacgcagaagaggcaaaggccacgacggactgtaccagggactcagcaccgccaccaaggacacctatgacgctcttcacatgcaggccctgccgcctcgg

SEQ ID NO: 295 - protein, 486 aa, synthetic construct
  REGION 1..486: note = source = /note="Description of Artificial Sequence: Synthetic polypeptide"
MALPVTALLLPLALLLHAARPDVVMTQSPDSLAVSLGERATINCRASKSISKDLAWYQQKPGQPPKLLIYSGSTLQSGVPDRFSGSGSGTDFTLTISSLQAEDVAVYYCQQHNKYPYTFGGGTKVEIKGGGGSGGGGSGGGGSGGGGSQVQLVQSGAEVKKPGASVKVSCKASGYTFTSYWMNWVRQAPGQGLEWMGRIDPYDSETHYNQKFKDRVTMTVDKSTSTAYMELSSLRSEDTAVYYCARGNWDDYWGQGTTVTVSSTTTPAPRPPTPAPTIASQPLSLRPEACRPAAGGAVHTRGLDFACDIYIWAPLAGTCGVLLLSLVITLYCKRGRKKLLYIFKQPFMRPVQTTQEEDGCSCRFPEEEEGGCELRVKFSRSADAPAYKQGQNQLYNELNLGRREEYDVLDKRRGRDPEMGGKPRRKNPQEGLYNELQKDKMAEAYSEIGMKGERRRGKGHDGLYQGLSTATKDTYDALHMQALPPR

SEQ ID NO: 296 - protein, 263 aa, synthetic construct
  REGION 1..263: note = source = /note="Description of Artificial Sequence: Synthetic polypeptide"
MALPVTALLLPLALLLHAARPDVVMTQSPDSLAVSLGERATINCRASKSISKDLAWYQQKPGQPPKLLIYSGSTLQSGVPDRFSGSGSGTDFTLTISSLQAEDVAVYYCQQHNKYPYTFGGGTKVEIKGGGGSGGGGSGGGGSGGGGSQVQLVQSGAEVKKPGASVKVSCKASGYTFTSYWMNWVRQAPGQGLEWMGRIDPYDSETHYNQKFKDRVTMTVDKSTSTAYMELSSLRSEDTAVYYCARGNWDDYWGQGTTVTVSS

SEQ ID NO: 297 - DNA, 1458 bp, synthetic construct
  misc_feature 1..1458: note = source = /note="Description of Artificial Sequence: Synthetic polynucleotide"
  source 1..1458: mol_type = other DNA
atggccctccctgtcaccgccctgctgcttccgctggctcttctgctccacgccgctcggccccaagtgcagctggtgcagtcaggcagcgaactgaagaagcccggagcctccgtcaaagtgtcctgcaaagcctcgggatacaccttcacctcctactggatgaactgggtccgccaggcacctggacaggggctggagtggatgggaaggatcgatccctacgattccgaaacccattacaatcagaagttcaaggaccggtttgtgttctccgtggacaagtccgtgtccaccgcctacctccaaattagcagcctgaaggcggaggatacagctgtctactactgcgctcgcggaaactgggatgactattggggccagggaactaccgtgactgtgtcctccgggggtggcggtagcggaggagggggctccggcggcggcggctcagggggcggaggaagcgacgtgcagctcacccagtcgccctcatttctgtcggcctcagtgggagacagagtgaccattacttgtcgggcctccaagagcatctccaaggacctggcctggtatcagcagaagccaggaaaggcgcctaagttgctcatctactcggggtcgaccctgcaatctggcgtgccgtcccggttctccggttcgggaagcggtaccgaattcacccttactatctcctccctgcaaccggaggacttcgccacctactactgccaacagcacaacaagtacccgtacactttcgggggtggcacgaaggtcgaaatcaagaccactaccccagcaccgaggccacccaccccggctcctaccatcgcctcccagcctctgtccctgcgtccggaggcatgtagacccgcagctggtggggccgtgcatacccggggtcttgacttcgcctgcgatatctacatttgggcccctctggctggtacttgcggggtcctgctgctttcactcgtgatcactctttactgtaagcgcggtcggaagaagctgctgtacatctttaagcaacccttcatgaggcctgtgcagactactcaagaggaggacggctgttcatgccggttcccagaggaggaggaaggcggctgcgaactgcgcgtgaaattcagccgcagcgcagatgctccagcctacaagcaggggcagaaccagctctacaacgaactcaatcttggtcggagagaggagtacgacgtgctggacaagcggagaggacgggacccagaaatgggcgggaagccgcgcagaaagaatccccaagagggcctgtacaacgagctccaaaaggataagatggcagaagcctatagcgagattggtatgaaaggggaacgcagaagaggcaaaggccacgacggactgtaccagggactcagcaccgccaccaaggacacctatgacgctcttcacatgcaggccctgccgcctcgg

SEQ ID NO: 298 - protein, 486 aa, synthetic construct
  REGION 1..486: note = source = /note="Description of Artificial Sequence: Synthetic polypeptide"
MALPVTALLLPLALLLHAARPQVQLVQSGSELKKPGASVKVSCKASGYTFTSYWMNWVRQAPGQGLEWMGRIDPYDSETHYNQKFKDRFVFSVDKSVSTAYLQISSLKAEDTAVYYCARGNWDDYWGQGTTVTVSSGGGGSGGGGSGGGGSGGGGSDVQLTQSPSFLSASVGDRVTITCRASKSISKDLAWYQQKPGKAPKLLIYSGSTLQSGVPSRFSGSGSGTEFTLTISSLQPEDFATYYCQQHNKYPYTFGGGTKVEIKTTTPAPRPPTPAPTIASQPLSLRPEACRPAAGGAVHTRGLDFACDIYIWAPLAGTCGVLLLSLVITLYCKRGRKKLLYIFKQPFMRPVQTTQEEDGCSCRFPEEEEGGCELRVKFSRSADAPAYKQGQNQLYNELNLGRREEYDVLDKRRGRDPEMGGKPRRKNPQEGLYNELQKDKMAEAYSEIGMKGERRRGKGHDGLYQGLSTATKDTYDALHMQALPPR

SEQ ID NO: 299 - protein, 263 aa, synthetic construct
  REGION 1..263: note = source = /note="Description of Artificial Sequence: Synthetic polypeptide"
MALPVTALLLPLALLLHAARPQVQLVQSGSELKKPGASVKVSCKASGYTFTSYWMNWVRQAPGQGLEWMGRIDPYDSETHYNQKFKDRFVFSVDKSVSTAYLQISSLKAEDTAVYYCARGNWDDYWGQGTTVTVSSGGGGSGGGGSGGGGSGGGGSDVQLTQSPSFLSASVGDRVTITCRASKSISKDLAWYQQKPGKAPKLLIYSGSTLQSGVPSRFSGSGSGTEFTLTISSLQPEDFATYYCQQHNKYPYTFGGGTKVEIK

SEQ ID NO: 300 - protein, 115 aa, synthetic construct
  REGION 1..115: note = source = /note="Description of Artificial Sequence: Synthetic polypeptide"
QVQLVQSGSELKKPGASVKVSCKASGYTFTSYWMNWVRQAPGQGLEWMGRIDPYDSETHYNQKFKDRFVFSVDKSVSTAYLQISSLKAEDTAVYYCARGNWDDYWGQGTTVTVSS

SEQ ID NO: 301 - DNA, 1458 bp, synthetic construct
  misc_feature 1..1458: note = source = /note="Description of Artificial Sequence: Synthetic polynucleotide"
  source 1..1458: mol_type = other DNA
atggccctccctgtcaccgccctgctgcttccgctggctcttctgctccacgccgctcggccccaagtgcagctggtgcagtcaggcagcgaactgaagaagcccggagcctccgtcaaagtgtcctgcaaagcctcgggatacaccttcacctcctactggatgaactgggtccgccaggcacctggacaggggctggagtggatgggaaggatcgatccctacgattccgaaacccattacaatcagaagttcaaggaccggtttgtgttctccgtggacaagtccgtgtccaccgcctacctccaaattagcagcctgaaggcggaggatacagctgtctactactgcgctcgcggaaactgggatgactattggggccagggaactaccgtgactgtgtcctccgggggtggcggtagcggaggagggggctccggcggcggcggctcagggggcggaggaagcgaagtggtgctgacccagtcgcccgcaaccctctctctgtcgccgggagaacgcgccactctttcctgtcgggcgtccaagagcatctcaaaggacctcgcctggtaccagcagaagcctggtcaagccccgcggctgctgatctactccggctccacgctgcaatcaggaatcccagccagattttccggttcggggtcggggactgacttcaccttgaccattagctcgctggaacctgaggacttcgccgtgtattactgccagcagcacaacaagtacccgtacaccttcggaggcggtactaaggtcgagatcaagaccactaccccagcaccgaggccacccaccccggctcctaccatcgcctcccagcctctgtccctgcgtccggaggcatgtagacccgcagctggtggggccgtgcatacccggggtcttgacttcgcctgcgatatctacatttgggcccctctggctggtacttgcggggtcctgctgctttcactcgtgatcactctttactgtaagcgcggtcggaagaagctgctgtacatctttaagcaacccttcatgaggcctgtgcagactactcaagaggaggacggctgttcatgccggttcccagaggaggaggaaggcggctgcgaactgcgcgtgaaattcagccgcagcgcagatgctccagcctacaagcaggggcagaaccagctctacaacgaactcaatcttggtcggagagaggagtacgacgtgctggacaagcggagaggacgggacccagaaatgggcgggaagccgcgcagaaagaatccccaagagggcctgtacaacgagctccaaaaggataagatggcagaagcctatagcgagattggtatgaaaggggaacgcagaagaggcaaaggccacgacggactgtaccagggactcagcaccgccaccaaggacacctatgacgctcttcacatgcaggccctgccgcctcgg

SEQ ID NO: 302 - protein, 486 aa, synthetic construct
  REGION 1..486: note = source = /note="Description of Artificial Sequence: Synthetic polypeptide"
MALPVTALLLPLALLLHAARPQVQLVQSGSELKKPGASVKVSCKASGYTFTSYWMNWVRQAPGQGLEWMGRIDPYDSETHYNQKFKDRFVFSVDKSVSTAYLQISSLKAEDTAVYYCARGNWDDYWGQGTTVTVSSGGGGSGGGGSGGGGSGGGGSEVVLTQSPATLSLSPGERATLSCRASKSISKDLAWYQQKPGQAPRLLIYSGSTLQSGIPARFSGSGSGTDFTLTISSLEPEDFAVYYCQQHNKYPYTFGGGTKVEIKTTTPAPRPPTPAPTIASQPLSLRPEACRPAAGGAVHTRGLDFACDIYIWAPLAGTCGVLLLSLVITLYCKRGRKKLLYIFKQPFMRPVQTTQEEDGCSCRFPEEEEGGCELRVKFSRSADAPAYKQGQNQLYNELNLGRREEYDVLDKRRGRDPEMGGKPRRKNPQEGLYNELQKDKMAEAYSEIGMKGERRRGKGHDGLYQGLSTATKDTYDALHMQALPPR

SEQ ID NO: 303 - protein, 263 aa, synthetic construct
  REGION 1..263: note = source = /note="Description of Artificial Sequence: Synthetic polypeptide"
MALPVTALLLPLALLLHAARPQVQLVQSGSELKKPGASVKVSCKASGYTFTSYWMNWVRQAPGQGLEWMGRIDPYDSETHYNQKFKDRFVFSVDKSVSTAYLQISSLKAEDTAVYYCARGNWDDYWGQGTTVTVSSGGGGSGGGGSGGGGSGGGGSEVVLTQSPATLSLSPGERATLSCRASKSISKDLAWYQQKPGQAPRLLIYSGSTLQSGIPARFSGSGSGTDFTLTISSLEPEDFAVYYCQQHNKYPYTFGGGTKVEIK

SEQ ID NO: 304 - DNA, 1458 bp, synthetic construct
  misc_feature 1..1458: note = source = /note="Description of Artificial Sequence: Synthetic polynucleotide"
  source 1..1458: mol_type = other DNA
atggccctccctgtcaccgccctgctgcttccgctggctcttctgctccacgccgctcggccccaagtgcagctggtgcagtcaggcagcgaactgaagaagcccggagcctccgtcaaagtgtcctgcaaagcctcgggatacaccttcacctcctactggatgaactgggtccgccaggcacctggacaggggctggagtggatgggaaggatcgatccctacgattccgaaacccattacaatcagaagttcaaggaccggtttgtgttctccgtggacaagtccgtgtccaccgcctacctccaaattagcagcctgaaggcggaggatacagctgtctactactgcgctcgcggaaactgggatgactattggggccagggaactaccgtgactgtgtcctccgggggtggcggtagcggaggagggggctccggcggcggcggctcagggggcggaggaagcgacgtcgtgatgacccagtcaccggcattcctgtccgtgactcccggagaaaaggtcacgattacttgccgggcgtccaagagcatctccaaggacctcgcctggtaccaacagaagccggaccaggcccctaagctgttgatctactcggggtccacccttcaatcgggagtgccatcgcggtttagcggttcgggttctgggaccgacttcactttcaccatctcctcactggaagccgaggatgccgccacttactactgtcagcagcacaacaagtatccgtacaccttcggaggcggtaccaaagtggagatcaagaccactaccccagcaccgaggccacccaccccggctcctaccatcgcctcccagcctctgtccctgcgtccggaggcatgtagacccgcagctggtggggccgtgcatacccggggtcttgacttcgcctgcgatatctacatttgggcccctctggctggtacttgcggggtcctgctgctttcactcgtgatcactctttactgtaagcgcggtcggaagaagctgctgtacatctttaagcaacccttcatgaggcctgtgcagactactcaagaggaggacggctgttcatgccggttcccagaggaggaggaaggcggctgcgaactgcgcgtgaaattcagccgcagcgcagatgctccagcctacaagcaggggcagaaccagctctacaacgaactcaatcttggtcggagagaggagtacgacgtgctggacaagcggagaggacgggacccagaaatgggcgggaagccgcgcagaaagaatccccaagagggcctgtacaacgagctccaaaaggataagatggcagaagcctatagcgagattggtatgaaaggggaacgcagaagaggcaaaggccacgacggactgtaccagggactcagcaccgccaccaaggacacctatgacgctcttcacatgcaggccctgccgcctcgg

SEQ ID NO: 305 - protein, 486 aa, synthetic construct
  REGION 1..486: note = source = /note="Description of Artificial Sequence: Synthetic polypeptide"
MALPVTALLLPLALLLHAARPQVQLVQSGSELKKPGASVKVSCKASGYTFTSYWMNWVRQAPGQGLEWMGRIDPYDSETHYNQKFKDRFVFSVDKSVSTAYLQISSLKAEDTAVYYCARGNWDDYWGQGTTVTVSSGGGGSGGGGSGGGGSGGGGSDVVMTQSPAFLSVTPGEKVTITCRASKSISKDLAWYQQKPDQAPKLLIYSGSTLQSGVPSRFSGSGSGTDFTFTISSLEAEDAATYYCQQHNKYPYTFGGGTKVEIKTTTPAPRPPTPAPTIASQPLSLRPEACRPAAGGAVHTRGLDFACDIYIWAPLAGTCGVLLLSLVITLYCKRGRKKLLYIFKQPFMRPVQTTQEEDGCSCRFPEEEEGGCELRVKFSRSADAPAYKQGQNQLYNELNLGRREEYDVLDKRRGRDPEMGGKPRRKNPQEGLYNELQKDKMAEAYSEIGMKGERRRGKGHDGLYQGLSTATKDTYDALHMQALPPR

SEQ ID NO: 306 - protein, 263 aa, synthetic construct
  REGION 1..263: note = source = /note="Description of Artificial Sequence: Synthetic polypeptide"
MALPVTALLLPLALLLHAARPQVQLVQSGSELKKPGASVKVSCKASGYTFTSYWMNWVRQAPGQGLEWMGRIDPYDSETHYNQKFKDRFVFSVDKSVSTAYLQISSLKAEDTAVYYCARGNWDDYWGQGTTVTVSSGGGGSGGGGSGGGGSGGGGSDVVMTQSPAFLSVTPGEKVTITCRASKSISKDLAWYQQKPDQAPKLLIYSGSTLQSGVPSRFSGSGSGTDFTFTISSLEAEDAATYYCQQHNKYPYTFGGGTKVEIK

SEQ ID NO: 307 - DNA, 1458 bp, synthetic construct
  misc_feature 1..1458: note = source = /note="Description of Artificial Sequence: Synthetic polynucleotide"
  source 1..1458: mol_type = other DNA
atggccctccctgtcaccgccctgctgcttccgctggctcttctgctccacgccgctcggccccaagtgcagctggtgcagtcaggcagcgaactgaagaagcccggagcctccgtcaaagtgtcctgcaaagcctcgggatacaccttcacctcctactggatgaactgggtccgccaggcacctggacaggggctggagtggatgggaaggatcgatccctacgattccgaaacccattacaatcagaagttcaaggaccggtttgtgttctccgtggacaagtccgtgtccaccgcctacctccaaattagcagcctgaaggcggaggatacagctgtctactactgcgctcgcggaaactgggatgactattggggccagggaactaccgtgactgtgtcctccgggggtggcggtagcggaggagggggctccggcggcggcggctcagggggcggaggaagcgacgtggtcatgactcagtccccggactcactcgcggtgtcgcttggagagagagcgaccatcaactgtcgggcctcaaagagcatcagcaaggacctggcctggtaccagcagaagccgggacagccgccaaagctgctgatctactccgggtccaccttgcaatctggtgtccctgaccggttctccggttccgggtcgggtaccgacttcacgctcactatttcgtcgctgcaagccgaagatgtggccgtgtactattgccaacagcacaacaagtacccctacacttttggcggaggcaccaaggtggaaatcaagaccactaccccagcaccgaggccacccaccccggctcctaccatcgcctcccagcctctgtccctgcgtccggaggcatgtagacccgcagctggtggggccgtgcatacccggggtcttgacttcgcctgcgatatctacatttgggcccctctggctggtacttgcggggtcctgctgctttcactcgtgatcactctttactgtaagcgcggtcggaagaagctgctgtacatctttaagcaacccttcatgaggcctgtgcagactactcaagaggaggacggctgttcatgccggttcccagaggaggaggaaggcggctgcgaactgcgcgtgaaattcagccgcagcgcagatgctccagcctacaagcaggggcagaaccagctctacaacgaactcaatcttggtcggagagaggagtacgacgtgctggacaagcggagaggacgggacccagaaatgggcgggaagccgcgcagaaagaatccccaagagggcctgtacaacgagctccaaaaggataagatggcagaagcctatagcgagattggtatgaaaggggaacgcagaagaggcaaaggccacgacggactgtaccagggactcagcaccgccaccaaggacacctatgacgctcttcacatgcaggccctgccgcctcgg

SEQ ID NO: 308 - protein, 486 aa, synthetic construct
  REGION 1..486: note = source = /note="Description of Artificial Sequence: Synthetic polypeptide"
MALPVTALLLPLALLLHAARPQVQLVQSGSELKKPGASVKVSCKASGYTFTSYWMNWVRQAPGQGLEWMGRIDPYDSETHYNQKFKDRFVFSVDKSVSTAYLQISSLKAEDTAVYYCARGNWDDYWGQGTTVTVSSGGGGSGGGGSGGGGSGGGGSDVVMTQSPDSLAVSLGERATINCRASKSISKDLAWYQQKPGQPPKLLIYSGSTLQSGVPDRFSGSGSGTDFTLTISSLQAEDVAVYYCQQHNKYPYTFGGGTKVEIKTTTPAPRPPTPAPTIASQPLSLRPEACRPAAGGAVHTRGLDFACDIYIWAPLAGTCGVLLLSLVITLYCKRGRKKLLYIFKQPFMRPVQTTQEEDGCSCRFPEEEEGGCELRVKFSRSADAPAYKQGQNQLYNELNLGRREEYDVLDKRRGRDPEMGGKPRRKNPQEGLYNELQKDKMAEAYSEIGMKGERRRGKGHDGLYQGLSTATKDTYDALHMQALPPR

SEQ ID NO: 309 - protein, 263 aa, synthetic construct
  REGION 1..263: note = source = /note="Description of Artificial Sequence: Synthetic polypeptide"
MALPVTALLLPLALLLHAARPQVQLVQSGSELKKPGASVKVSCKASGYTFTSYWMNWVRQAPGQGLEWMGRIDPYDSETHYNQKFKDRFVFSVDKSVSTAYLQISSLKAEDTAVYYCARGNWDDYWGQGTTVTVSSGGGGSGGGGSGGGGSGGGGSDVVMTQSPDSLAVSLGERATINCRASKSISKDLAWYQQKPGQPPKLLIYSGSTLQSGVPDRFSGSGSGTDFTLTISSLQAEDVAVYYCQQHNKYPYTFGGGTKVEIK

SEQ ID NO: 310 - DNA, 1458 bp, synthetic construct
  misc_feature 1..1458: note = source = /note="Description of Artificial Sequence: Synthetic polynucleotide"
  source 1..1458: mol_type = other DNA
atggccctccctgtcaccgccctgctgcttccgctggctcttctgctccacgccgctcggcccgacgtgcagctcacccagtcgccctcatttctgtcggcctcagtgggagacagagtgaccattacttgtcgggcctccaagagcatctccaaggacctggcctggtatcagcagaagccaggaaaggcgcctaagttgctcatctactcggggtcgaccctgcaatctggcgtgccgtcccggttctccggttcgggaagcggtaccgaattcacccttactatctcctccctgcaaccggaggacttcgccacctactactgccaacagcacaacaagtacccgtacactttcgggggtggcacgaaggtcgaaatcaaggggggtggcggtagcggaggagggggctccggcggcggcggctcagggggcggaggaagccaagtgcagctggtgcagtcaggcagcgaactgaagaagcccggagcctccgtcaaagtgtcctgcaaagcctcgggatacaccttcacctcctactggatgaactgggtccgccaggcacctggacaggggctggagtggatgggaaggatcgatccctacgattccgaaacccattacaatcagaagttcaaggaccggtttgtgttctccgtggacaagtccgtgtccaccgcctacctccaaattagcagcctgaaggcggaggatacagctgtctactactgcgctcgcggaaactgggatgactattggggccagggaactaccgtgactgtgtcctccaccactaccccagcaccgaggccacccaccccggctcctaccatcgcctcccagcctctgtccctgcgtccggaggcatgtagacccgcagctggtggggccgtgcatacccggggtcttgacttcgcctgcgatatctacatttgggcccctctggctggtacttgcggggtcctgctgctttcactcgtgatcactctttactgtaagcgcggtcggaagaagctgctgtacatctttaagcaacccttcatgaggcctgtgcagactactcaagaggaggacggctgttcatgccggttcccagaggaggaggaaggcggctgcgaactgcgcgtgaaattcagccgcagcgcagatgctccagcctacaagcaggggcagaaccagctctacaacgaactcaatcttggtcggagagaggagtacgacgtgctggacaagcggagaggacgggacccagaaatgggcgggaagccgcgcagaaagaatccccaagagggcctgtacaacgagctccaaaaggataagatggcagaagcctatagcgagattggtatgaaaggggaacgcagaagaggcaaaggccacgacggactgtaccagggactcagcaccgccaccaaggacacctatgacgctcttcacatgcaggccctgccgcctcgg

SEQ ID NO: 311 - protein, 486 aa, synthetic construct
  REGION 1..486: note = source = /note="Description of Artificial Sequence: Synthetic polypeptide"
MALPVTALLLPLALLLHAARPDVQLTQSPSFLSASVGDRVTITCRASKSISKDLAWYQQKPGKAPKLLIYSGSTLQSGVPSRFSGSGSGTEFTLTISSLQPEDFATYYCQQHNKYPYTFGGGTKVEIKGGGGSGGGGSGGGGSGGGGSQVQLVQSGSELKKPGASVKVSCKASGYTFTSYWMNWVRQAPGQGLEWMGRIDPYDSETHYNQKFKDRFVFSVDKSVSTAYLQISSLKAEDTAVYYCARGNWDDYWGQGTTVTVSSTTTPAPRPPTPAPTIASQPLSLRPEACRPAAGGAVHTRGLDFACDIYIWAPLAGTCGVLLLSLVITLYCKRGRKKLLYIFKQPFMRPVQTTQEEDGCSCRFPEEEEGGCELRVKFSRSADAPAYKQGQNQLYNELNLGRREEYDVLDKRRGRDPEMGGKPRRKNPQEGLYNELQKDKMAEAYSEIGMKGERRRGKGHDGLYQGLSTATKDTYDALHMQALPPR

SEQ ID NO: 312 - protein, 263 aa, synthetic construct
  REGION 1..263: note = source = /note="Description of Artificial Sequence: Synthetic polypeptide"
MALPVTALLLPLALLLHAARPDVQLTQSPSFLSASVGDRVTITCRASKSISKDLAWYQQKPGKAPKLLIYSGSTLQSGVPSRFSGSGSGTEFTLTISSLQPEDFATYYCQQHNKYPYTFGGGTKVEIKGGGGSGGGGSGGGGSGGGGSQVQLVQSGSELKKPGASVKVSCKASGYTFTSYWMNWVRQAPGQGLEWMGRIDPYDSETHYNQKFKDRFVFSVDKSVSTAYLQISSLKAEDTAVYYCARGNWDDYWGQGTTVTVSS

SEQ ID NO: 313 - DNA, 1458 bp, synthetic construct
  misc_feature 1..1458: note = source = /note="Description of Artificial Sequence: Synthetic polynucleotide"
  source 1..1458: mol_type = other DNA
atggccctccctgtcaccgccctgctgcttccgctggctcttctgctccacgccgctcggcccgaagtggtgctgacccagtcgcccgcaaccctctctctgtcgccgggagaacgcgccactctttcctgtcgggcgtccaagagcatctcaaaggacctcgcctggtaccagcagaagcctggtcaagccccgcggctgctgatctactccggctccacgctgcaatcaggaatcccagccagattttccggttcggggtcggggactgacttcaccttgaccattagctcgctggaacctgaggacttcgccgtgtattactgccagcagcacaacaagtacccgtacaccttcggaggcggtactaaggtcgagatcaaggggggtggcggtagcggaggagggggctccggcggcggcggctcagggggcggaggaagccaagtgcagctggtgcagtcaggcagcgaactgaagaagcccggagcctccgtcaaagtgtcctgcaaagcctcgggatacaccttcacctcctactggatgaactgggtccgccaggcacctggacaggggctggagtggatgggaaggatcgatccctacgattccgaaacccattacaatcagaagttcaaggaccggtttgtgttctccgtggacaagtccgtgtccaccgcctacctccaaattagcagcctgaaggcggaggatacagctgtctactactgcgctcgcggaaactgggatgactattggggccagggaactaccgtgactgtgtcctccaccactaccccagcaccgaggccacccaccccggctcctaccatcgcctcccagcctctgtccctgcgtccggaggcatgtagacccgcagctggtggggccgtgcatacccggggtcttgacttcgcctgcgatatctacatttgggcccctctggctggtacttgcggggtcctgctgctttcactcgtgatcactctttactgtaagcgcggtcggaagaagctgctgtacatctttaagcaacccttcatgaggcctgtgcagactactcaagaggaggacggctgttcatgccggttcccagaggaggaggaaggcggctgcgaactgcgcgtgaaattcagccgcagcgcagatgctccagcctacaagcaggggcagaaccagctctacaacgaactcaatcttggtcggagagaggagtacgacgtgctggacaagcggagaggacgggacccagaaatgggcgggaagccgcgcagaaagaatccccaagagggcctgtacaacgagctccaaaaggataagatggcagaagcctatagcgagattggtatgaaaggggaacgcagaagaggcaaaggccacgacggactgtaccagggactcagcaccgccaccaaggacacctatgacgctcttcacatgcaggccctgccgcctcgg

SEQ ID NO: 314 - protein, 486 aa, synthetic construct
  REGION 1..486: note = source = /note="Description of Artificial Sequence: Synthetic polypeptide"
MALPVTALLLPLALLLHAARPEVVLTQSPATLSLSPGERATLSCRASKSISKDLAWYQQKPGQAPRLLIYSGSTLQSGIPARFSGSGSGTDFTLTISSLEPEDFAVYYCQQHNKYPYTFGGGTKVEIKGGGGSGGGGSGGGGSGGGGSQVQLVQSGSELKKPGASVKVSCKASGYTFTSYWMNWVRQAPGQGLEWMGRIDPYDSETHYNQKFKDRFVFSVDKSVSTAYLQISSLKAEDTAVYYCARGNWDDYWGQGTTVTVSSTTTPAPRPPTPAPTIASQPLSLRPEACRPAAGGAVHTRGLDFACDIYIWAPLAGTCGVLLLSLVITLYCKRGRKKLLYIFKQPFMRPVQTTQEEDGCSCRFPEEEEGGCELRVKFSRSADAPAYKQGQNQLYNELNLGRREEYDVLDKRRGRDPEMGGKPRRKNPQEGLYNELQKDKMAEAYSEIGMKGERRRGKGHDGLYQGLSTATKDTYDALHMQALPPR

SEQ ID NO: 315 - protein, 263 aa, synthetic construct
  REGION 1..263: note = source = /note="Description of Artificial Sequence: Synthetic polypeptide"
MALPVTALLLPLALLLHAARPEVVLTQSPATLSLSPGERATLSCRASKSISKDLAWYQQKPGQAPRLLIYSGSTLQSGIPARFSGSGSGTDFTLTISSLEPEDFAVYYCQQHNKYPYTFGGGTKVEIKGGGGSGGGGSGGGGSGGGGSQVQLVQSGSELKKPGASVKVSCKASGYTFTSYWMNWVRQAPGQGLEWMGRIDPYDSETHYNQKFKDRFVFSVDKSVSTAYLQISSLKAEDTAVYYCARGNWDDYWGQGTTVTVSS

SEQ ID NO: 316 - DNA, 1458 bp, synthetic construct
  misc_feature 1..1458: note = source = /note="Description of Artificial Sequence: Synthetic polynucleotide"
  source 1..1458: mol_type = other DNA
atggccctccctgtcaccgccctgctgcttccgctggctcttctgctccacgccgctcggcccgacgtcgtgatgacccagtcaccggcattcctgtccgtgactcccggagaaaaggtcacgattacttgccgggcgtccaagagcatctccaaggacctcgcctggtaccaacagaagccggaccaggcccctaagctgttgatctactcggggtccacccttcaatcgggagtgccatcgcggtttagcggttcgggttctgggaccgacttcactttcaccatctcctcactggaagccgaggatgccgccacttactactgtcagcagcacaacaagtatccgtacaccttcggaggcggtaccaaagtggagatcaaggggggtggcggtagcggaggagggggctccggcggcggcggctcagggggcggaggaagccaagtgcagctggtgcagtcaggcagcgaactgaagaagcccggagcctccgtcaaagtgtcctgcaaagcctcgggatacaccttcacctcctactggatgaactgggtccgccaggcacctggacaggggctggagtggatgggaaggatcgatccctacgattccgaaacccattacaatcagaagttcaaggaccggtttgtgttctccgtggacaagtccgtgtccaccgcctacctccaaattagcagcctgaaggcggaggatacagctgtctactactgcgctcgcggaaactgggatgactattggggccagggaactaccgtgactgtgtcctccaccactaccccagcaccgaggccacccaccccggctcctaccatcgcctcccagcctctgtccctgcgtccggaggcatgtagacccgcagctggtggggccgtgcatacccggggtcttgacttcgcctgcgatatctacatttgggcccctctggctggtacttgcggggtcctgctgctttcactcgtgatcactctttactgtaagcgcggtcggaagaagctgctgtacatctttaagcaacccttcatgaggcctgtgcagactactcaagaggaggacggctgttcatgccggttcccagaggaggaggaaggcggctgcgaactgcgcgtgaaattcagccgcagcgcagatgctccagcctacaagcaggggcagaaccagctctacaacgaactcaatcttggtcggagagaggagtacgacgtgctggacaagcggagaggacgggacccagaaatgggcgggaagccgcgcagaaagaatccccaagagggcctgtacaacgagctccaaaaggataagatggcagaagcctatagcgagattggtatgaaaggggaacgcagaagaggcaaaggccacgacggactgtaccagggactcagcaccgccaccaaggacacctatgacgctcttcacatgcaggccctgccgcctcgg

SEQ ID NO: 317 - protein, 486 aa, synthetic construct
  REGION 1..486: note = source = /note="Description of Artificial Sequence: Synthetic polypeptide"
MALPVTALLLPLALLLHAARPDVVMTQSPAFLSVTPGEKVTITCRASKSISKDLAWYQQKPDQAPKLLIYSGSTLQSGVPSRFSGSGSGTDFTFTISSLEAEDAATYYCQQHNKYPYTFGGGTKVEIKGGGGSGGGGSGGGGSGGGGSQVQLVQSGSELKKPGASVKVSCKASGYTFTSYWMNWVRQAPGQGLEWMGRIDPYDSETHYNQKFKDRFVFSVDKSVSTAYLQISSLKAEDTAVYYCARGNWDDYWGQGTTVTVSSTTTPAPRPPTPAPTIASQPLSLRPEACRPAAGGAVHTRGLDFACDIYIWAPLAGTCGVLLLSLVITLYCKRGRKKLLYIFKQPFMRPVQTTQEEDGCSCRFPEEEEGGCELRVKFSRSADAPAYKQGQNQLYNELNLGRREEYDVLDKRRGRDPEMGGKPRRKNPQEGLYNELQKDKMAEAYSEIGMKGERRRGKGHDGLYQGLSTATKDTYDALHMQALPPR

SEQ ID NO: 318 - protein, 263 aa, synthetic construct
  REGION 1..263: note = source = /note="Description of Artificial Sequence: Synthetic polypeptide"
MALPVTALLLPLALLLHAARPDVVMTQSPAFLSVTPGEKVTITCRASKSISKDLAWYQQKPDQAPKLLIYSGSTLQSGVPSRFSGSGSGTDFTFTISSLEAEDAATYYCQQHNKYPYTFGGGTKVEIKGGGGSGGGGSGGGGSGGGGSQVQLVQSGSELKKPGASVKVSCKASGYTFTSYWMNWVRQAPGQGLEWMGRIDPYDSETHYNQKFKDRFVFSVDKSVSTAYLQISSLKAEDTAVYYCARGNWDDYWGQGTTVTVSS

SEQ ID NO: 319 - DNA, 1458 bp, synthetic construct
  misc_feature 1..1458: note = source = /note="Description of Artificial Sequence: Synthetic polynucleotide"
  source 1..1458: mol_type = other DNA
atggccctccctgtcaccgccctgctgcttccgctggctcttctgctccacgccgctcggcccgacgtggtcatgactcagtccccggactcactcgcggtgtcgcttggagagagagcgaccatcaactgtcgggcctcaaagagcatcagcaaggacctggcctggtaccagcagaagccgggacagccgccaaagctgctgatctactccgggtccaccttgcaatctggtgtccctgaccggttctccggttccgggtcgggtaccgacttcacgctcactatttcgtcgctgcaagccgaagatgtggccgtgtactattgccaacagcacaacaagtacccctacacttttggcggaggcaccaaggtggaaatcaaggggggtggcggtagcggaggagggggctccggcggcggcggctcagggggcggaggaagccaagtgcagctggtgcagtcaggcagcgaactgaagaagcccggagcctccgtcaaagtgtcctgcaaagcctcgggatacaccttcacctcctactggatgaactgggtccgccaggcacctggacaggggctggagtggatgggaaggatcgatccctacgattccgaaacccattacaatcagaagttcaaggaccggtttgtgttctccgtggacaagtccgtgtccaccgcctacctccaaattagcagcctgaaggcggaggatacagctgtctactactgcgctcgcggaaactgggatgactattggggccagggaactaccgtgactgtgtcctccaccactaccccagcaccgaggccacccaccccggctcctaccatcgcctcccagcctctgtccctgcgtccggaggcatgtagacccgcagctggtggggccgtgcatacccggggtcttgacttcgcctgcgatatctacatttgggcccctctggctggtacttgcggggtcctgctgctttcactcgtgatcactctttactgtaagcgcggtcggaagaagctgctgtacatctttaagcaacccttcatgaggcctgtgcagactactcaagaggaggacggctgttcatgccggttcccagaggaggaggaaggcggctgcgaactgcgcgtgaaattcagccgcagcgcagatgctccagcctacaagcaggggcagaaccagctctacaacgaactcaatcttggtcggagagaggagtacgacgtgctggacaagcggagaggacgggacccagaaatgggcgggaagccgcgcagaaagaatccccaagagggcctgtacaacgagctccaaaaggataagatggcagaagcctatagcgagattggtatgaaaggggaacgcagaagaggcaaaggccacgacggactgtaccagggactcagcaccgccaccaaggacacctatgacgctcttcacatgcaggccctgccgcctcgg

SEQ ID NO: 320 - protein, 486 aa, synthetic construct
  REGION 1..486: note = source = /note="Description of Artificial Sequence: Synthetic polypeptide"
MALPVTALLLPLALLLHAARPDVVMTQSPDSLAVSLGERATINCRASKSISKDLAWYQQKPGQPPKLLIYSGSTLQSGVPDRFSGSGSGTDFTLTISSLQAEDVAVYYCQQHNKYPYTFGGGTKVEIKGGGGSGGGGSGGGGSGGGGSQVQLVQSGSELKKPGASVKVSCKASGYTFTSYWMNWVRQAPGQGLEWMGRIDPYDSETHYNQKFKDRFVFSVDKSVSTAYLQISSLKAEDTAVYYCARGNWDDYWGQGTTVTVSSTTTPAPRPPTPAPTIASQPLSLRPEACRPAAGGAVHTRGLDFACDIYIWAPLAGTCGVLLLSLVITLYCKRGRKKLLYIFKQPFMRPVQTTQEEDGCSCRFPEEEEGGCELRVKFSRSADAPAYKQGQNQLYNELNLGRREEYDVLDKRRGRDPEMGGKPRRKNPQEGLYNELQKDKMAEAYSEIGMKGERRRGKGHDGLYQGLSTATKDTYDALHMQALPPR

SEQ ID NO: 321 - protein, 263 aa, synthetic construct
  REGION 1..263: note = source = /note="Description of Artificial Sequence: Synthetic polypeptide"
MALPVTALLLPLALLLHAARPDVVMTQSPDSLAVSLGERATINCRASKSISKDLAWYQQKPGQPPKLLIYSGSTLQSGVPDRFSGSGSGTDFTLTISSLQAEDVAVYYCQQHNKYPYTFGGGTKVEIKGGGGSGGGGSGGGGSGGGGSQVQLVQSGSELKKPGASVKVSCKASGYTFTSYWMNWVRQAPGQGLEWMGRIDPYDSETHYNQKFKDRFVFSVDKSVSTAYLQISSLKAEDTAVYYCARGNWDDYWGQGTTVTVSS

SEQ ID NO: 322 - DNA, 1458 bp, synthetic construct
  misc_feature 1..1458: note = source = /note="Description of Artificial Sequence: Synthetic polynucleotide"
  source 1..1458: mol_type = other DNA
atggccctccctgtcaccgccctgctgcttccgctggctcttctgctccacgccgctcggcccgaggtgcagctggtgcagagcggagccgaggtcaagaagcctggagaatccctgaggatcagctgcaaaggcagcgggtataccttcacctcctactggatgaattgggtccgccagatgcccggaaaaggcctggagtggatgggacggattgacccctacgactcggaaacccattacaaccagaagttcaaggatcacgtgaccatctccgtggacaagtccatttccactgcgtacctccagtggtcaagcctgaaggcctccgacactgctatgtactactgcgcacgcggaaactgggatgattactggggacagggaacaaccgtgactgtgtcctccgggggtggcggtagcggaggagggggctccggcggcggcggctcagggggcggaggaagcgacgtgcagctcacccagtcgccctcatttctgtcggcctcagtgggagacagagtgaccattacttgtcgggcctccaagagcatctccaaggacctggcctggtatcagcagaagccaggaaaggcgcctaagttgctcatctactcggggtcgaccctgcaatctggcgtgccgtcccggttctccggttcgggaagcggtaccgaattcacccttactatctcctccctgcaaccggaggacttcgccacctactactgccaacagcacaacaagtacccgtacactttcgggggtggcacgaaggtcgaaatcaagaccactaccccagcaccgaggccacccaccccggctcctaccatcgcctcccagcctctgtccctgcgtccggaggcatgtagacccgcagctggtggggccgtgcatacccggggtcttgacttcgcctgcgatatctacatttgggcccctctggctggtacttgcggggtcctgctgctttcactcgtgatcactctttactgtaagcgcggtcggaagaagctgctgtacatctttaagcaacccttcatgaggcctgtgcagactactcaagaggaggacggctgttcatgccggttcccagaggaggaggaaggcggctgcgaactgcgcgtgaaattcagccgcagcgcagatgctccagcctacaagcaggggcagaaccagctctacaacgaactcaatcttggtcggagagaggagtacgacgtgctggacaagcggagaggacgggacccagaaatgggcgggaagccgcgcagaaagaatccccaagagggcctgtacaacgagctccaaaaggataagatggcagaagcctatagcgagattggtatgaaaggggaacgcagaagaggcaaaggccacgacggactgtaccagggactcagcaccgccaccaaggacacctatgacgctcttcacatgcaggccctgccgcctcgg

SEQ ID NO: 323 - protein, 486 aa, synthetic construct
  REGION 1..486: note = source = /note="Description of Artificial Sequence: Synthetic polypeptide"
MALPVTALLLPLALLLHAARPEVQLVQSGAEVKKPGESLRISCKGSGYTFTSYWMNWVRQMPGKGLEWMGRIDPYDSETHYNQKFKDHVTISVDKSISTAYLQWSSLKASDTAMYYCARGNWDDYWGQGTTVTVSSGGGGSGGGGSGGGGSGGGGSDVQLTQSPSFLSASVGDRVTITCRASKSISKDLAWYQQKPGKAPKLLIYSGSTLQSGVPSRFSGSGSGTEFTLTISSLQPEDFATYYCQQHNKYPYTFGGGTKVEIKTTTPAPRPPTPAPTIASQPLSLRPEACRPAAGGAVHTRGLDFACDIYIWAPLAGTCGVLLLSLVITLYCKRGRKKLLYIFKQPFMRPVQTTQEEDGCSCRFPEEEEGGCELRVKFSRSADAPAYKQGQNQLYNELNLGRREEYDVLDKRRGRDPEMGGKPRRKNPQEGLYNELQKDKMAEAYSEIGMKGERRRGKGHDGLYQGLSTATKDTYDALHMQALPPR

SEQ ID NO: 324 - protein, 263 aa, synthetic construct
  REGION 1..263: note = source = /note="Description of Artificial Sequence: Synthetic polypeptide"
MALPVTALLLPLALLLHAARPEVQLVQSGAEVKKPGESLRISCKGSGYTFTSYWMNWVRQMPGKGLEWMGRIDPYDSETHYNQKFKDHVTISVDKSISTAYLQWSSLKASDTAMYYCARGNWDDYWGQGTTVTVSSGGGGSGGGGSGGGGSGGGGSDVQLTQSPSFLSASVGDRVTITCRASKSISKDLAWYQQKPGKAPKLLIYSGSTLQSGVPSRFSGSGSGTEFTLTISSLQPEDFATYYCQQHNKYPYTFGGGTKVEIK

SEQ ID NO: 325 - protein, 115 aa, synthetic construct
  REGION 1..115: note = source = /note="Description of Artificial Sequence: Synthetic polypeptide"
EVQLVQSGAEVKKPGESLRISCKGSGYTFTSYWMNWVRQMPGKGLEWMGRIDPYDSETHYNQKFKDHVTISVDKSISTAYLQWSSLKASDTAMYYCARGNWDDYWGQGTTVTVSS

SEQ ID NO: 326 - DNA, 1458 bp, synthetic construct
  misc_feature 1..1458: note = source = /note="Description of Artificial Sequence: Synthetic polynucleotide"
  source 1..1458: mol_type = other DNA
atggccctccctgtcaccgccctgctgcttccgctggctcttctgctccacgccgctcggcccgaggtgcagctggtgcagagcggagccgaggtcaagaagcctggagaatccctgaggatcagctgcaaaggcagcgggtataccttcacctcctactggatgaattgggtccgccagatgcccggaaaaggcctggagtggatgggacggattgacccctacgactcggaaacccattacaaccagaagttcaaggatcacgtgaccatctccgtggacaagtccatttccactgcgtacctccagtggtcaagcctgaaggcctccgacactgctatgtactactgcgcacgcggaaactgggatgattactggggacagggaacaaccgtgactgtgtcctccgggggtggcggtagcggaggagggggctccggcggcggcggctcagggggcggaggaagcgaagtggtgctgacccagtcgcccgcaaccctctctctgtcgccgggagaacgcgccactctttcctgtcgggcgtccaagagcatctcaaaggacctcgcctggtaccagcagaagcctggtcaagccccgcggctgctgatctactccggctccacgctgcaatcaggaatcccagccagattttccggttcggggtcggggactgacttcaccttgaccattagctcgctggaacctgaggacttcgccgtgtattactgccagcagcacaacaagtacccgtacaccttcggaggcggtactaaggtcgagatcaagaccactaccccagcaccgaggccacccaccccggctcctaccatcgcctcccagcctctgtccctgcgtccggaggcatgtagacccgcagctggtggggccgtgcatacccggggtcttgacttcgcctgcgatatctacatttgggcccctctggctggtacttgcggggtcctgctgctttcactcgtgatcactctttactgtaagcgcggtcggaagaagctgctgtacatctttaagcaacccttcatgaggcctgtgcagactactcaagaggaggacggctgttcatgccggttcccagaggaggaggaaggcggctgcgaactgcgcgtgaaattcagccgcagcgcagatgctccagcctacaagcaggggcagaaccagctctacaacgaactcaatcttggtcggagagaggagtacgacgtgctggacaagcggagaggacgggacccagaaatgggcgggaagccgcgcagaaagaatccccaagagggcctgtacaacgagctccaaaaggataagatggcagaagcctatagcgagattggtatgaaaggggaacgcagaagaggcaaaggccacgacggactgtaccagggactcagcaccgccaccaaggacacctatgacgctcttcacatgcaggccctgccgcctcgg

SEQ ID NO: 327 - protein, 486 aa, synthetic construct
  REGION 1..486: note = source = /note="Description of Artificial Sequence: Synthetic polypeptide"
MALPVTALLLPLALLLHAARPEVQLVQSGAEVKKPGESLRISCKGSGYTFTSYWMNWVRQMPGKGLEWMGRIDPYDSETHYNQKFKDHVTISVDKSISTAYLQWSSLKASDTAMYYCARGNWDDYWGQGTTVTVSSGGGGSGGGGSGGGGSGGGGSEVVLTQSPATLSLSPGERATLSCRASKSISKDLAWYQQKPGQAPRLLIYSGSTLQSGIPARFSGSGSGTDFTLTISSLEPEDFAVYYCQQHNKYPYTFGGGTKVEIKTTTPAPRPPTPAPTIASQPLSLRPEACRPAAGGAVHTRGLDFACDIYIWAPLAGTCGVLLLSLVITLYCKRGRKKLLYIFKQPFMRPVQTTQEEDGCSCRFPEEEEGGCELRVKFSRSADAPAYKQGQNQLYNELNLGRREEYDVLDKRRGRDPEMGGKPRRKNPQEGLYNELQKDKMAEAYSEIGMKGERRRGKGHDGLYQGLSTATKDTYDALHMQALPPR

SEQ ID NO: 328 - protein, 263 aa, synthetic construct
  REGION 1..263: note = source = /note="Description of Artificial Sequence: Synthetic polypeptide"
MALPVTALLLPLALLLHAARPEVQLVQSGAEVKKPGESLRISCKGSGYTFTSYWMNWVRQMPGKGLEWMGRIDPYDSETHYNQKFKDHVTISVDKSISTAYLQWSSLKASDTAMYYCARGNWDDYWGQGTTVTVSSGGGGSGGGGSGGGGSGGGGSEVVLTQSPATLSLSPGERATLSCRASKSISKDLAWYQQKPGQAPRLLIYSGSTLQSGIPARFSGSGSGTDFTLTISSLEPEDFAVYYCQQHNKYPYTFGGGTKVEIK

SEQ ID NO: 329 - DNA, 1458 bp, synthetic construct
  misc_feature 1..1458: note = source = /note="Description of Artificial Sequence: Synthetic polynucleotide"
  source 1..1458: mol_type = other DNA
atggccctccctgtcaccgccctgctgcttccgctggctcttctgctccacgccgctcggcccgaggtgcagctggtgcagagcggagccgaggtcaagaagcctggagaatccctgaggatcagctgcaaaggcagcgggtataccttcacctcctactggatgaattgggtccgccagatgcccggaaaaggcctggagtggatgggacggattgacccctacgactcggaaacccattacaaccagaagttcaaggatcacgtgaccatctccgtggacaagtccatttccactgcgtacctccagtggtcaagcctgaaggcctccgacactgctatgtactactgcgcacgcggaaactgggatgattactggggacagggaacaaccgtgactgtgtcctccgggggtggcggtagcggaggagggggctccggcggcggcggctcagggggcggaggaagcgacgtcgtgatgacccagtcaccggcattcctgtccgtgactcccggagaaaaggtcacgattacttgccgggcgtccaagagcatctccaaggacctcgcctggtaccaacagaagccggaccaggcccctaagctgttgatctactcggggtccacccttcaatcgggagtgccatcgcggtttagcggttcgggttctgggaccgacttcactttcaccatctcctcactggaagccgaggatgccgccacttactactgtcagcagcacaacaagtatccgtacaccttcggaggcggtaccaaagtggagatcaagaccactaccccagcaccgaggccacccaccccggctcctaccatcgcctcccagcctctgtccctgcgtccggaggcatgtagacccgcagctggtggggccgtgcatacccggggtcttgacttcgcctgcgatatctacatttgggcccctctggctggtacttgcggggtcctgctgctttcactcgtgatcactctttactgtaagcgcggtcggaagaagctgctgtacatctttaagcaacccttcatgaggcctgtgcagactactcaagaggaggacggctgttcatgccggttcccagaggaggaggaaggcggctgcgaactgcgcgtgaaattcagccgcagcgcagatgctccagcctacaagcaggggcagaaccagctctacaacgaactcaatcttggtcggagagaggagtacgacgtgctggacaagcggagaggacgggacccagaaatgggcgggaagccgcgcagaaagaatccccaagagggcctgtacaacgagctccaaaaggataagatggcagaagcctatagcgagattggtatgaaaggggaacgcagaagaggcaaaggccacgacggactgtaccagggactcagcaccgccaccaaggacacctatgacgctcttcacatgcaggccctgccgcctcgg

SEQ ID NO: 330 - protein, 486 aa, synthetic construct
  REGION 1..486: note = source = /note="Description of Artificial Sequence: Synthetic polypeptide"
MALPVTALLLPLALLLHAARPEVQLVQSGAEVKKPGESLRISCKGSGYTFTSYWMNWVRQMPGKGLEWMGRIDPYDSETHYNQKFKDHVTISVDKSISTAYLQWSSLKASDTAMYYCARGNWDDYWGQGTTVTVSSGGGGSGGGGSGGGGSGGGGSDVVMTQSPAFLSVTPGEKVTITCRASKSISKDLAWYQQKPDQAPKLLIYSGSTLQSGVPSRFSGSGSGTDFTFTISSLEAEDAATYYCQQHNKYPYTFGGGTKVEIKTTTPAPRPPTPAPTIASQPLSLRPEACRPAAGGAVHTRGLDFACDIYIWAPLAGTCGVLLLSLVITLYCKRGRKKLLYIFKQPFMRPVQTTQEEDGCSCRFPEEEEGGCELRVKFSRSADAPAYKQGQNQLYNELNLGRREEYDVLDKRRGRDPEMGGKPRRKNPQEGLYNELQKDKMAEAYSEIGMKGERRRGKGHDGLYQGLSTATKDTYDALHMQALPPR

SEQ ID NO: 331 - protein, 263 aa, synthetic construct
  REGION 1..263: note = source = /note="Description of Artificial Sequence: Synthetic polypeptide"
MALPVTALLLPLALLLHAARPEVQLVQSGAEVKKPGESLRISCKGSGYTFTSYWMNWVRQMPGKGLEWMGRIDPYDSETHYNQKFKDHVTISVDKSISTAYLQWSSLKASDTAMYYCARGNWDDYWGQGTTVTVSSGGGGSGGGGSGGGGSGGGGSDVVMTQSPAFLSVTPGEKVTITCRASKSISKDLAWYQQKPDQAPKLLIYSGSTLQSGVPSRFSGSGSGTDFTFTISSLEAEDAATYYCQQHNKYPYTFGGGTKVEIK

SEQ ID NO: 332 - DNA, 1458 bp, synthetic construct
  misc_feature 1..1458: note = source = /note="Description of Artificial Sequence: Synthetic polynucleotide"
  source 1..1458: mol_type = other DNA
atggccctccctgtcaccgccctgctgcttccgctggctcttctgctccacgccgctcggcccgaggtgcagctggtgcagagcggagccgaggtcaagaagcctggagaatccctgaggatcagctgcaaaggcagcgggtataccttcacctcctactggatgaattgggtccgccagatgcccggaaaaggcctggagtggatgggacggattgacccctacgactcggaaacccattacaaccagaagttcaaggatcacgtgaccatctccgtggacaagtccatttccactgcgtacctccagtggtcaagcctgaaggcctccgacactgctatgtactactgcgcacgcggaaactgggatgattactggggacagggaacaaccgtgactgtgtcctccgggggtggcggtagcggaggagggggctccggcggcggcggctcagggggcggaggaagcgacgtggtcatgactcagtccccggactcactcgcggtgtcgcttggagagagagcgaccatcaactgtcgggcctcaaagagcatcagcaaggacctggcctggtaccagcagaagccgggacagccgccaaagctgctgatctactccgggtccaccttgcaatctggtgtccctgaccggttctccggttccgggtcgggtaccgacttcacgctcactatttcgtcgctgcaagccgaagatgtggccgtgtactattgccaacagcacaacaagtacccctacacttttggcggaggcaccaaggtggaaatcaagaccactaccccagcaccgaggccacccaccccggctcctaccatcgcctcccagcctctgtccctgcgtccggaggcatgtagacccgcagctggtggggccgtgcatacccggggtcttgacttcgcctgcgatatctacatttgggcccctctggctggtacttgcggggtcctgctgctttcactcgtgatcactctttactgtaagcgcggtcggaagaagctgctgtacatctttaagcaacccttcatgaggcctgtgcagactactcaagaggaggacggctgttcatgccggttcccagaggaggaggaaggcggctgcgaactgcgcgtgaaattcagccgcagcgcagatgctccagcctacaagcaggggcagaaccagctctacaacgaactcaatcttggtcggagagaggagtacgacgtgctggacaagcggagaggacgggacccagaaatgggcgggaagccgcgcagaaagaatccccaagagggcctgtacaacgagctccaaaaggataagatggcagaagcctatagcgagattggtatgaaaggggaacgcagaagaggcaaaggccacgacggactgtaccagggactcagcaccgccaccaaggacacctatgacgctcttcacatgcaggccctgccgcctcgg

SEQ ID NO: 333 - protein, 486 aa, synthetic construct
  REGION 1..486: note = source = /note="Description of Artificial Sequence: Synthetic polypeptide"
MALPVTALLLPLALLLHAARPEVQLVQSGAEVKKPGESLRISCKGSGYTFTSYWMNWVRQMPGKGLEWMGRIDPYDSETHYNQKFKDHVTISVDKSISTAYLQWSSLKASDTAMYYCARGNWDDYWGQGTTVTVSSGGGGSGGGGSGGGGSGGGGSDVVMTQSPDSLAVSLGERATINCRASKSISKDLAWYQQKPGQPPKLLIYSGSTLQSGVPDRFSGSGSGTDFTLTISSLQAEDVAVYYCQQHNKYPYTFGGGTKVEIKTTTPAPRPPTPAPTIASQPLSLRPEACRPAAGGAVHTRGLDFACDIYIWAPLAGTCGVLLLSLVITLYCKRGRKKLLYIFKQPFMRPVQTTQEEDGCSCRFPEEEEGGCELRVKFSRSADAPAYKQGQNQLYNELNLGRREEYDVLDKRRGRDPEMGGKPRRKNPQEGLYNELQKDKMAEAYSEIGMKGERRRGKGHDGLYQGLSTATKDTYDALHMQALPPR

SEQ ID NO: 334 - protein, 263 aa, synthetic construct
  REGION 1..263: note = source = /note="Description of Artificial Sequence: Synthetic polypeptide"
MALPVTALLLPLALLLHAARPEVQLVQSGAEVKKPGESLRISCKGSGYTFTSYWMNWVRQMPGKGLEWMGRIDPYDSETHYNQKFKDHVTISVDKSISTAYLQWSSLKASDTAMYYCARGNWDDYWGQGTTVTVSSGGGGSGGGGSGGGGSGGGGSDVVMTQSPDSLAVSLGERATINCRASKSISKDLAWYQQKPGQPPKLLIYSGSTLQSGVPDRFSGSGSGTDFTLTISSLQAEDVAVYYCQQHNKYPYTFGGGTKVEIK

SEQ ID NO: 335 - DNA, 1458 bp, synthetic construct
  misc_feature 1..1458: note = source = /note="Description of Artificial Sequence: Synthetic polynucleotide"
  source 1..1458: mol_type = other DNA
atggccctccctgtcaccgccctgctgcttccgctggctcttctgctccacgccgctcggcccgacgtgcagctcacccagtcgccctcatttctgtcggcctcagtgggagacagagtgaccattacttgtcgggcctccaagagcatctccaaggacctggcctggtatcagcagaagccaggaaaggcgcctaagttgctcatctactcggggtcgaccctgcaatctggcgtgccgtcccggttctccggttcgggaagcggtaccgaattcacccttactatctcctccctgcaaccggaggacttcgccacctactactgccaacagcacaacaagtacccgtacactttcgggggtggcacgaaggtcgaaatcaaggggggtggcggtagcggaggagggggctccggcggcggcggctcagggggcggaggaagcgaggtgcagctggtgcagagcggagccgaggtcaagaagcctggagaatccctgaggatcagctgcaaaggcagcgggtataccttcacctcctactggatgaattgggtccgccagatgcccggaaaaggcctggagtggatgggacggattgacccctacgactcggaaacccattacaaccagaagttcaaggatcacgtgaccatctccgtggacaagtccatttccactgcgtacctccagtggtcaagcctgaaggcctccgacactgctatgtactactgcgcacgcggaaactgggatgattactggggacagggaacaaccgtgactgtgtcctccaccactaccccagcaccgaggccacccaccccggctcctaccatcgcctcccagcctctgtccctgcgtccggaggcatgtagacccgcagctggtggggccgtgcatacccggggtcttgacttcgcctgcgatatctacatttgggcccctctggctggtacttgcggggtcctgctgctttcactcgtgatcactctttactgtaagcgcggtcggaagaagctgctgtacatctttaagcaacccttcatgaggcctgtgcagactactcaagaggaggacggctgttcatgccggttcccagaggaggaggaaggcggctgcgaactgcgcgtgaaattcagccgcagcgcagatgctccagcctacaagcaggggcagaaccagctctacaacgaactcaatcttggtcggagagaggagtacgacgtgctggacaagcggagaggacgggacccagaaatgggcgggaagccgcgcagaaagaatccccaagagggcctgtacaacgagctccaaaaggataagatggcagaagcctatagcgagattggtatgaaaggggaacgcagaagaggcaaaggccacgacggactgtaccagggactcagcaccgccaccaaggacacctatgacgctcttcacatgcaggccctgccgcctcgg

SEQ ID NO: 336 - protein, 486 aa, synthetic construct
  REGION 1..486: note = source = /note="Description of Artificial Sequence: Synthetic polypeptide"
MALPVTALLLPLALLLHAARPDVQLTQSPSFLSASVGDRVTITCRASKSISKDLAWYQQKPGKAPKLLIYSGSTLQSGVPSRFSGSGSGTEFTLTISSLQPEDFATYYCQQHNKYPYTFGGGTKVEIKGGGGSGGGGSGGGGSGGGGSEVQLVQSGAEVKKPGESLRISCKGSGYTFTSYWMNWVRQMPGKGLEWMGRIDPYDSETHYNQKFKDHVTISVDKSISTAYLQWSSLKASDTAMYYCARGNWDDYWGQGTTVTVSSTTTPAPRPPTPAPTIASQPLSLRPEACRPAAGGAVHTRGLDFACDIYIWAPLAGTCGVLLLSLVITLYCKRGRKKLLYIFKQPFMRPVQTTQEEDGCSCRFPEEEEGGCELRVKFSRSADAPAYKQGQNQLYNELNLGRREEYDVLDKRRGRDPEMGGKPRRKNPQEGLYNELQKDKMAEAYSEIGMKGERRRGKGHDGLYQGLSTATKDTYDALHMQALPPR

SEQ ID NO: 337 - protein, 263 aa, synthetic construct
  REGION 1..263: note = source = /note="Description of Artificial Sequence: Synthetic polypeptide"
MALPVTALLLPLALLLHAARPDVQLTQSPSFLSASVGDRVTITCRASKSISKDLAWYQQKPGKAPKLLIYSGSTLQSGVPSRFSGSGSGTEFTLTISSLQPEDFATYYCQQHNKYPYTFGGGTKVEIKGGGGSGGGGSGGGGSGGGGSEVQLVQSGAEVKKPGESLRISCKGSGYTFTSYWMNWVRQMPGKGLEWMGRIDPYDSETHYNQKFKDHVTISVDKSISTAYLQWSSLKASDTAMYYCARGNWDDYWGQGTTVTVSS

SEQ ID NO: 338 - DNA, 1458 bp, synthetic construct
  misc_feature 1..1458: note = source = /note="Description of Artificial Sequence: Synthetic polynucleotide"
  source 1..1458: mol_type = other DNA
atggccctccctgtcaccgccctgctgcttccgctggctcttctgctccacgccgctcggcccgaagtggtgctgacccagtcgcccgcaaccctctctctgtcgccgggagaacgcgccactctttcctgtcgggcgtccaagagcatctcaaaggacctcgcctggtaccagcagaagcctggtcaagccccgcggctgctgatctactccggctccacgctgcaatcaggaatcccagccagattttccggttcggggtcggggactgacttcaccttgaccattagctcgctggaacctgaggacttcgccgtgtattactgccagcagcacaacaagtacccgtacaccttcggaggcggtactaaggtcgagatcaaggggggtggcggtagcggaggagggggctccggcggcggcggctcagggggcggaggaagcgaggtgcagctggtgcagagcggagccgaggtcaagaagcctggagaatccctgaggatcagctgcaaaggcagcgggtataccttcacctcctactggatgaattgggtccgccagatgcccggaaaaggcctggagtggatgggacggattgacccctacgactcggaaacccattacaaccagaagttcaaggatcacgtgaccatctccgtggacaagtccatttccactgcgtacctccagtggtcaagcctgaaggcctccgacactgctatgtactactgcgcacgcggaaactgggatgattactggggacagggaacaaccgtgactgtgtcctccaccactaccccagcaccgaggccacccaccccggctcctaccatcgcctcccagcctctgtccctgcgtccggaggcatgtagacccgcagctggtggggccgtgcatacccggggtcttgacttcgcctgcgatatctacatttgggcccctctggctggtacttgcggggtcctgctgctttcactcgtgatcactctttactgtaagcgcggtcggaagaagctgctgtacatctttaagcaacccttcatgaggcctgtgcagactactcaagaggaggacggctgttcatgccggttcccagaggaggaggaaggcggctgcgaactgcgcgtgaaattcagccgcagcgcagatgctccagcctacaagcaggggcagaaccagctctacaacgaactcaatcttggtcggagagaggagtacgacgtgctggacaagcggagaggacgggacccagaaatgggcgggaagccgcgcagaaagaatccccaagagggcctgtacaacgagctccaaaaggataagatggcagaagcctatagcgagattggtatgaaaggggaacgcagaagaggcaaaggccacgacggactgtaccagggactcagcaccgccaccaaggacacctatgacgctcttcacatgcaggccctgccgcctcgg

SEQ ID NO: 339 - protein, 486 aa, synthetic construct
  REGION 1..486: note = source = /note="Description of Artificial Sequence: Synthetic polypeptide"
MALPVTALLLPLALLLHAARPEVVLTQSPATLSLSPGERATLSCRASKSISKDLAWYQQKPGQAPRLLIYSGSTLQSGIPARFSGSGSGTDFTLTISSLEPEDFAVYYCQQHNKYPYTFGGGTKVEIKGGGGSGGGGSGGGGSGGGGSEVQLVQSGAEVKKPGESLRISCKGSGYTFTSYWMNWVRQMPGKGLEWMGRIDPYDSETHYNQKFKDHVTISVDKSISTAYLQWSSLKASDTAMYYCARGNWDDYWGQGTTVTVSSTTTPAPRPPTPAPTIASQPLSLRPEACRPAAGGAVHTRGLDFACDIYIWAPLAGTCGVLLLSLVITLYCKRGRKKLLYIFKQPFMRPVQTTQEEDGCSCRFPEEEEGGCELRVKFSRSADAPAYKQGQNQLYNELNLGRREEYDVLDKRRGRDPEMGGKPRRKNPQEGLYNELQKDKMAEAYSEIGMKGERRRGKGHDGLYQGLSTATKDTYDALHMQALPPR

SEQ ID NO: 340 - protein, 263 aa, synthetic construct
  REGION 1..263: note = source = /note="Description of Artificial Sequence: Synthetic polypeptide"
MALPVTALLLPLALLLHAARPEVVLTQSPATLSLSPGERATLSCRASKSISKDLAWYQQKPGQAPRLLIYSGSTLQSGIPARFSGSGSGTDFTLTISSLEPEDFAVYYCQQHNKYPYTFGGGTKVEIKGGGGSGGGGSGGGGSGGGGSEVQLVQSGAEVKKPGESLRISCKGSGYTFTSYWMNWVRQMPGKGLEWMGRIDPYDSETHYNQKFKDHVTISVDKSISTAYLQWSSLKASDTAMYYCARGNWDDYWGQGTTVTVSS

SEQ ID NO: 341 - DNA, 1458 bp, synthetic construct
  misc_feature 1..1458: note = source = /note="Description of Artificial Sequence: Synthetic polynucleotide"
  source 1..1458: mol_type = other DNA
atggccctccctgtcaccgccctgctgcttccgctggctcttctgctccacgccgctcggcccgacgtcgtgatgacccagtcaccggcattcctgtccgtgactcccggagaaaaggtcacgattacttgccgggcgtccaagagcatctccaaggacctcgcctggtaccaacagaagccggaccaggcccctaagctgttgatctactcggggtccacccttcaatcgggagtgccatcgcggtttagcggttcgggttctgggaccgacttcactttcaccatctcctcactggaagccgaggatgccgccacttactactgtcagcagcacaacaagtatccgtacaccttcggaggcggtaccaaagtggagatcaaggggggtggcggtagcggaggagggggctccggcggcggcggctcagggggcggaggaagcgaggtgcagctggtgcagagcggagccgaggtcaagaagcctggagaatccctgaggatcagctgcaaaggcagcgggtataccttcacctcctactggatgaattgggtccgccagatgcccggaaaaggcctggagtggatgggacggattgacccctacgactcggaaacccattacaaccagaagttcaaggatcacgtgaccatctccgtggacaagtccatttccactgcgtacctccagtggtcaagcctgaaggcctccgacactgctatgtactactgcgcacgcggaaactgggatgattactggggacagggaacaaccgtgactgtgtcctccaccactaccccagcaccgaggccacccaccccggctcctaccatcgcctcccagcctctgtccctgcgtccggaggcatgtagacccgcagctggtggggccgtgcatacccggggtcttgacttcgcctgcgatatctacatttgggcccctctggctggtacttgcggggtcctgctgctttcactcgtgatcactctttactgtaagcgcggtcggaagaagctgctgtacatctttaagcaacccttcatgaggcctgtgcagactactcaagaggaggacggctgttcatgccggttcccagaggaggaggaaggcggctgcgaactgcgcgtgaaattcagccgcagcgcagatgctccagcctacaagcaggggcagaaccagctctacaacgaactcaatcttggtcggagagaggagtacgacgtgctggacaagcggagaggacgggacccagaaatgggcgggaagccgcgcagaaagaatccccaagagggcctgtacaacgagctccaaaaggataagatggcagaagcctatagcgagattggtatgaaaggggaacgcagaagaggcaaaggccacgacggactgtaccagggactcagcaccgccaccaaggacacctatgacgctcttcacatgcaggccctgccgcctcgg

SEQ ID NO: 342 - protein, 486 aa, synthetic construct
  REGION 1..486: note = source = /note="Description of Artificial Sequence: Synthetic polypeptide"
MALPVTALLLPLALLLHAARPDVVMTQSPAFLSVTPGEKVTITCRASKSISKDLAWYQQKPDQAPKLLIYSGSTLQSGVPSRFSGSGSGTDFTFTISSLEAEDAATYYCQQHNKYPYTFGGGTKVEIKGGGGSGGGGSGGGGSGGGGSEVQLVQSGAEVKKPGESLRISCKGSGYTFTSYWMNWVRQMPGKGLEWMGRIDPYDSETHYNQKFKDHVTISVDKSISTAYLQWSSLKASDTAMYYCARGNWDDYWGQGTTVTVSSTTTPAPRPPTPAPTIASQPLSLRPEACRPAAGGAVHTRGLDFACDIYIWAPLAGTCGVLLLSLVITLYCKRGRKKLLYIFKQPFMRPVQTTQEEDGCSCRFPEEEEGGCELRVKFSRSADAPAYKQGQNQLYNELNLGRREEYDVLDKRRGRDPEMGGKPRRKNPQEGLYNELQKDKMAEAYSEIGMKGERRRGKGHDGLYQGLSTATKDTYDALHMQALPPR

SEQ ID NO: 343 - protein, 263 aa, synthetic construct
  REGION 1..263: note = source = /note="Description of Artificial Sequence: Synthetic polypeptide"
MALPVTALLLPLALLLHAARPDVVMTQSPAFLSVTPGEKVTITCRASKSISKDLAWYQQKPDQAPKLLIYSGSTLQSGVPSRFSGSGSGTDFTFTISSLEAEDAATYYCQQHNKYPYTFGGGTKVEIKGGGGSGGGGSGGGGSGGGGSEVQLVQSGAEVKKPGESLRISCKGSGYTFTSYWMNWVRQMPGKGLEWMGRIDPYDSETHYNQKFKDHVTISVDKSISTAYLQWSSLKASDTAMYYCARGNWDDYWGQGTTVTVSS

SEQ ID NO: 344 - DNA, 1458 bp, synthetic construct
  misc_feature 1..1458: note = source = /note="Description of Artificial Sequence: Synthetic polynucleotide"
  source 1..1458: mol_type = other DNA
atggccctccctgtcaccgccctgctgcttccgctggctcttctgctccacgccgctcggcccgacgtggtcatgactcagtccccggactcactcgcggtgtcgcttggagagagagcgaccatcaactgtcgggcctcaaagagcatcagcaaggacctggcctggtaccagcagaagccgggacagccgccaaagctgctgatctactccgggtccaccttgcaatctggtgtccctgaccggttctccggttccgggtcgggtaccgacttcacgctcactatttcgtcgctgcaagccgaagatgtggccgtgtactattgccaacagcacaacaagtacccctacacttttggcggaggcaccaaggtggaaatcaaggggggtggcggtagcggaggagggggctccggcggcggcggctcagggggcggaggaagcgaggtgcagctggtgcagagcggagccgaggtcaagaagcctggagaatccctgaggatcagctgcaaaggcagcgggtataccttcacctcctactggatgaattgggtccgccagatgcccggaaaaggcctggagtggatgggacggattgacccctacgactcggaaacccattacaaccagaagttcaaggatcacgtgaccatctccgtggacaagtccatttccactgcgtacctccagtggtcaagcctgaaggcctccgacactgctatgtactactgcgcacgcggaaactgggatgattactggggacagggaacaaccgtgactgtgtcctccaccactaccccagcaccgaggccacccaccccggctcctaccatcgcctcccagcctctgtccctgcgtccggaggcatgtagacccgcagctggtggggccgtgcatacccggggtcttgacttcgcctgcgatatctacatttgggcccctctggctggtacttgcggggtcctgctgctttcactcgtgatcactctttactgtaagcgcggtcggaagaagctgctgtacatctttaagcaacccttcatgaggcctgtgcagactactcaagaggaggacggctgttcatgccggttcccagaggaggaggaaggcggctgcgaactgcgcgtgaaattcagccgcagcgcagatgctccagcctacaagcaggggcagaaccagctctacaacgaactcaatcttggtcggagagaggagtacgacgtgctggacaagcggagaggacgggacccagaaatgggcgggaagccgcgcagaaagaatccccaagagggcctgtacaacgagctccaaaaggataagatggcagaagcctatagcgagattggtatgaaaggggaacgcagaagaggcaaaggccacgacggactgtaccagggactcagcaccgccaccaaggacacctatgacgctcttcacatgcaggccctgccgcctcgg

SEQ ID NO: 345 - protein, 486 aa, synthetic construct
  REGION 1..486: note = source = /note="Description of Artificial Sequence: Synthetic polypeptide"
MALPVTALLLPLALLLHAARPDVVMTQSPDSLAVSLGERATINCRASKSISKDLAWYQQKPGQPPKLLIYSGSTLQSGVPDRFSGSGSGTDFTLTISSLQAEDVAVYYCQQHNKYPYTFGGGTKVEIKGGGGSGGGGSGGGGSGGGGSEVQLVQSGAEVKKPGESLRISCKGSGYTFTSYWMNWVRQMPGKGLEWMGRIDPYDSETHYNQKFKDHVTISVDKSISTAYLQWSSLKASDTAMYYCARGNWDDYWGQGTTVTVSSTTTPAPRPPTPAPTIASQPLSLRPEACRPAAGGAVHTRGLDFACDIYIWAPLAGTCGVLLLSLVITLYCKRGRKKLLYIFKQPFMRPVQTTQEEDGCSCRFPEEEEGGCELRVKFSRSADAPAYKQGQNQLYNELNLGRREEYDVLDKRRGRDPEMGGKPRRKNPQEGLYNELQKDKMAEAYSEIGMKGERRRGKGHDGLYQGLSTATKDTYDALHMQALPPR

SEQ ID NO: 346 - protein, 263 aa, synthetic construct
  REGION 1..263: note = source = /note="Description of Artificial Sequence: Synthetic polypeptide"
MALPVTALLLPLALLLHAARPDVVMTQSPDSLAVSLGERATINCRASKSISKDLAWYQQKPGQPPKLLIYSGSTLQSGVPDRFSGSGSGTDFTLTISSLQAEDVAVYYCQQHNKYPYTFGGGTKVEIKGGGGSGGGGSGGGGSGGGGSEVQLVQSGAEVKKPGESLRISCKGSGYTFTSYWMNWVRQMPGKGLEWMGRIDPYDSETHYNQKFKDHVTISVDKSISTAYLQWSSLKASDTAMYYCARGNWDDYWGQGTTVTVSS

SEQ ID NO: 347 - DNA, 1458 bp, synthetic construct
  misc_feature 1..1458: note = source = /note="Description of Artificial Sequence: Synthetic polynucleotide"
  source 1..1458: mol_type = other DNA
atggccctccctgtcaccgccctgctgcttccgctggctcttctgctccacgccgctcggcccgaagtgcagctcgtcgagagcggagggggactggtgcagcccggaggaagcctgaggctgtcctgcgctgcctccggctacaccttcacctcctactggatgaactgggtcagacaggcacctggaaagggactggtctgggtgtcgcgcattgacccctacgactccgaaacccattacaatcagaaattcaaggaccgcttcaccatctccgtggacaaagccaagagcaccgcgtacctccaaatgaactccctgcgcgctgaggatacagcagtgtactattgcgcccggggaaactgggatgattactggggccagggaactactgtgactgtgtcatccgggggtggcggtagcggaggagggggctccggcggcggcggctcagggggcggaggaagcgacgtgcagctcacccagtcgccctcatttctgtcggcctcagtgggagacagagtgaccattacttgtcgggcctccaagagcatctccaaggacctggcctggtatcagcagaagccaggaaaggcgcctaagttgctcatctactcggggtcgaccctgcaatctggcgtgccgtcccggttctccggttcgggaagcggtaccgaattcacccttactatctcctccctgcaaccggaggacttcgccacctactactgccaacagcacaacaagtacccgtacactttcgggggtggcacgaaggtcgaaatcaagaccactaccccagcaccgaggccacccaccccggctcctaccatcgcctcccagcctctgtccctgcgtccggaggcatgtagacccgcagctggtggggccgtgcatacccggggtcttgacttcgcctgcgatatctacatttgggcccctctggctggtacttgcggggtcctgctgctttcactcgtgatcactctttactgtaagcgcggtcggaagaagctgctgtacatctttaagcaacccttcatgaggcctgtgcagactactcaagaggaggacggctgttcatgccggttcccagaggaggaggaaggcggctgcgaactgcgcgtgaaattcagccgcagcgcagatgctccagcctacaagcaggggcagaaccagctctacaacgaactcaatcttggtcggagagaggagtacgacgtgctggacaagcggagaggacgggacccagaaatgggcgggaagccgcgcagaaagaatccccaagagggcctgtacaacgagctccaaaaggataagatggcagaagcctatagcgagattggtatgaaaggggaacgcagaagaggcaaaggccacgacggactgtaccagggactcagcaccgccaccaaggacacctatgacgctcttcacatgcaggccctgccgcctcgg

SEQ ID NO: 348 - protein, 486 aa, synthetic construct
  REGION 1..486: note = source = /note="Description of Artificial Sequence: Synthetic polypeptide"
MALPVTALLLPLALLLHAARPEVQLVESGGGLVQPGGSLRLSCAASGYTFTSYWMNWVRQAPGKGLVWVSRIDPYDSETHYNQKFKDRFTISVDKAKSTAYLQMNSLRAEDTAVYYCARGNWDDYWGQGTTVTVSSGGGGSGGGGSGGGGSGGGGSDVQLTQSPSFLSASVGDRVTITCRASKSISKDLAWYQQKPGKAPKLLIYSGSTLQSGVPSRFSGSGSGTEFTLTISSLQPEDFATYYCQQHNKYPYTFGGGTKVEIKTTTPAPRPPTPAPTIASQPLSLRPEACRPAAGGAVHTRGLDFACDIYIWAPLAGTCGVLLLSLVITLYCKRGRKKLLYIFKQPFMRPVQTTQEEDGCSCRFPEEEEGGCELRVKFSRSADAPAYKQGQNQLYNELNLGRREEYDVLDKRRGRDPEMGGKPRRKNPQEGLYNELQKDKMAEAYSEIGMKGERRRGKGHDGLYQGLSTATKDTYDALHMQALPPR

SEQ ID NO: 349 - protein, 263 aa, synthetic construct
  REGION 1..263: note = source = /note="Description of Artificial Sequence: Synthetic polypeptide"
MALPVTALLLPLALLLHAARPEVQLVESGGGLVQPGGSLRLSCAASGYTFTSYWMNWVRQAPGKGLVWVSRIDPYDSETHYNQKFKDRFTISVDKAKSTAYLQMNSLRAEDTAVYYCARGNWDDYWGQGTTVTVSSGGGGSGGGGSGGGGSGGGGSDVQLTQSPSFLSASVGDRVTITCRASKSISKDLAWYQQKPGKAPKLLIYSGSTLQSGVPSRFSGSGSGTEFTLTISSLQPEDFATYYCQQHNKYPYTFGGGTKVEIK

SEQ ID NO: 350 - protein, 115 aa, synthetic construct
  REGION 1..115: note = source = /note="Description of Artificial Sequence: Synthetic polypeptide"
EVQLVESGGGLVQPGGSLRLSCAASGYTFTSYWMNWVRQAPGKGLVWVSRIDPYDSETHYNQKFKDRFTISVDKAKSTAYLQMNSLRAEDTAVYYCARGNWDDYWGQGTTVTVSS

SEQ ID NO: 351 - DNA, 1458 bp, synthetic construct
  misc_feature 1..1458: note = source = /note="Description of Artificial Sequence: Synthetic polynucleotide"
  source 1..1458: mol_type = other DNA
atggccctccctgtcaccgccctgctgcttccgctggctcttctgctccacgccgctcggcccgaagtgcagctcgtcgagagcggagggggactggtgcagcccggaggaagcctgaggctgtcctgcgctgcctccggctacaccttcacctcctactggatgaactgggtcagacaggcacctggaaagggactggtctgggtgtcgcgcattgacccctacgactccgaaacccattacaatcagaaattcaaggaccgcttcaccatctccgtggacaaagccaagagcaccgcgtacctccaaatgaactccctgcgcgctgaggatacagcagtgtactattgcgcccggggaaactgggatgattactggggccagggaactactgtgactgtgtcatccgggggtggcggtagcggaggagggggctccggcggcggcggctcagggggcggaggaagcgaagtggtgctgacccagtcgcccgcaaccctctctctgtcgccgggagaacgcgccactctttcctgtcgggcgtccaagagcatctcaaaggacctcgcctggtaccagcagaagcctggtcaagccccgcggctgctgatctactccggctccacgctgcaatcaggaatcccagccagattttccggttcggggtcggggactgacttcaccttgaccattagctcgctggaacctgaggacttcgccgtgtattactgccagcagcacaacaagtacccgtacaccttcggaggcggtactaaggtcgagatcaagaccactaccccagcaccgaggccacccaccccggctcctaccatcgcctcccagcctctgtccctgcgtccggaggcatgtagacccgcagctggtggggccgtgcatacccggggtcttgacttcgcctgcgatatctacatttgggcccctctggctggtacttgcggggtcctgctgctttcactcgtgatcactctttactgtaagcgcggtcggaagaagctgctgtacatctttaagcaacccttcatgaggcctgtgcagactactcaagaggaggacggctgttcatgccggttcccagaggaggaggaaggcggctgcgaactgcgcgtgaaattcagccgcagcgcagatgctccagcctacaagcaggggcagaaccagctctacaacgaactcaatcttggtcggagagaggagtacgacgtgctggacaagcggagaggacgggacccagaaatgggcgggaagccgcgcagaaagaatccccaagagggcctgtacaacgagctccaaaaggataagatggcagaagcctatagcgagattggtatgaaaggggaacgcagaagaggcaaaggccacgacggactgtaccagggactcagcaccgccaccaaggacacctatgacgctcttcacatgcaggccctgccgcctcgg

SEQ ID NO: 352 - protein, 486 aa, synthetic construct
  REGION 1..486: note = source = /note="Description of Artificial Sequence: Synthetic polypeptide"
MALPVTALLLPLALLLHAARPEVQLVESGGGLVQPGGSLRLSCAASGYTFTSYWMNWVRQAPGKGLVWVSRIDPYDSETHYNQKFKDRFTISVDKAKSTAYLQMNSLRAEDTAVYYCARGNWDDYWGQGTTVTVSSGGGGSGGGGSGGGGSGGGGSEVVLTQSPATLSLSPGERATLSCRASKSISKDLAWYQQKPGQAPRLLIYSGSTLQSGIPARFSGSGSGTDFTLTISSLEPEDFAVYYCQQHNKYPYTFGGGTKVEIKTTTPAPRPPTPAPTIASQPLSLRPEACRPAAGGAVHTRGLDFACDIYIWAPLAGTCGVLLLSLVITLYCKRGRKKLLYIFKQPFMRPVQTTQEEDGCSCRFPEEEEGGCELRVKFSRSADAPAYKQGQNQLYNELNLGRREEYDVLDKRRGRDPEMGGKPRRKNPQEGLYNELQKDKMAEAYSEIGMKGERRRGKGHDGLYQGLSTATKDTYDALHMQALPPR

SEQ ID NO: 353 - protein, 263 aa, synthetic construct
  REGION 1..263: note = source = /note="Description of Artificial Sequence: Synthetic polypeptide"
MALPVTALLLPLALLLHAARPEVQLVESGGGLVQPGGSLRLSCAASGYTFTSYWMNWVRQAPGKGLVWVSRIDPYDSETHYNQKFKDRFTISVDKAKSTAYLQMNSLRAEDTAVYYCARGNWDDYWGQGTTVTVSSGGGGSGGGGSGGGGSGGGGSEVVLTQSPATLSLSPGERATLSCRASKSISKDLAWYQQKPGQAPRLLIYSGSTLQSGIPARFSGSGSGTDFTLTISSLEPEDFAVYYCQQHNKYPYTFGGGTKVEIK

SEQ ID NO: 354 - DNA, 1458 bp, synthetic construct
  misc_feature 1..1458: note = source = /note="Description of Artificial Sequence: Synthetic polynucleotide"
  source 1..1458: mol_type = other DNA
atggccctccctgtcaccgccctgctgcttccgctggctcttctgctccacgccgctcggcccgaagtgcagctcgtcgagagcggagggggactggtgcagcccggaggaagcctgaggctgtcctgcgctgcctccggctacaccttcacctcctactggatgaactgggtcagacaggcacctggaaagggactggtctgggtgtcgcgcattgacccctacgactccgaaacccattacaatcagaaattcaaggaccgcttcaccatctccgtggacaaagccaagagcaccgcgtacctccaaatgaactccctgcgcgctgaggatacagcagtgtactattgcgcccggggaaactgggatgattactggggccagggaactactgtgactgtgtcatccgggggtggcggtagcggaggagggggctccggcggcggcggctcagggggcggaggaagcgacgtcgtgatgacccagtcaccggcattcctgtccgtgactcccggagaaaaggtcacgattacttgccgggcgtccaagagcatctccaaggacctcgcctggtaccaacagaagccggaccaggcccctaagctgttgatctactcggggtccacccttcaatcgggagtgccatcgcggtttagcggttcgggttctgggaccgacttcactttcaccatctcctcactggaagccgaggatgccgccacttactactgtcagcagcacaacaagtatccgtacaccttcggaggcggtaccaaagtggagatcaagaccactaccccagcaccgaggccacccaccccggctcctaccatcgcctcccagcctctgtccctgcgtccggaggcatgtagacccgcagctggtggggccgtgcatacccggggtcttgacttcgcctgcgatatctacatttgggcccctctggctggtacttgcggggtcctgctgctttcactcgtgatcactctttactgtaagcgcggtcggaagaagctgctgtacatctttaagcaacccttcatgaggcctgtgcagactactcaagaggaggacggctgttcatgccggttcccagaggaggaggaaggcggctgcgaactgcgcgtgaaattcagccgcagcgcagatgctccagcctacaagcaggggcagaaccagctctacaacgaactcaatcttggtcggagagaggagtacgacgtgctggacaagcggagaggacgggacccagaaatgggcgggaagccgcgcagaaagaatccccaagagggcctgtacaacgagctccaaaaggataagatggcagaagcctatagcgagattggtatgaaaggggaacgcagaagaggcaaaggccacgacggactgtaccagggactcagcaccgccaccaaggacacctatgacgctcttcacatgcaggccctgccgcctcgg

SEQ ID NO: 355 - protein, 486 aa, synthetic construct
  REGION 1..486: note = source = /note="Description of Artificial Sequence: Synthetic polypeptide"
MALPVTALLLPLALLLHAARPEVQLVESGGGLVQPGGSLRLSCAASGYTFTSYWMNWVRQAPGKGLVWVSRIDPYDSETHYNQKFKDRFTISVDKAKSTAYLQMNSLRAEDTAVYYCARGNWDDYWGQGTTVTVSSGGGGSGGGGSGGGGSGGGGSDVVMTQSPAFLSVTPGEKVTITCRASKSISKDLAWYQQKPDQAPKLLIYSGSTLQSGVPSRFSGSGSGTDFTFTISSLEAEDAATYYCQQHNKYPYTFGGGTKVEIKTTTPAPRPPTPAPTIASQPLSLRPEACRPAAGGAVHTRGLDFACDIYIWAPLAGTCGVLLLSLVITLYCKRGRKKLLYIFKQPFMRPVQTTQEEDGCSCRFPEEEEGGCELRVKFSRSADAPAYKQGQNQLYNELNLGRREEYDVLDKRRGRDPEMGGKPRRKNPQEGLYNELQKDKMAEAYSEIGMKGERRRGKGHDGLYQGLSTATKDTYDALHMQALPPR

SEQ ID NO: 356 - protein, 263 aa, synthetic construct
  REGION 1..263: note = source = /note="Description of Artificial Sequence: Synthetic polypeptide"
MALPVTALLLPLALLLHAARPEVQLVESGGGLVQPGGSLRLSCAASGYTFTSYWMNWVRQAPGKGLVWVSRIDPYDSETHYNQKFKDRFTISVDKAKSTAYLQMNSLRAEDTAVYYCARGNWDDYWGQGTTVTVSSGGGGSGGGGSGGGGSGGGGSDVVMTQSPAFLSVTPGEKVTITCRASKSISKDLAWYQQKPDQAPKLLIYSGSTLQSGVPSRFSGSGSGTDFTFTISSLEAEDAATYYCQQHNKYPYTFGGGTKVEIK

SEQ ID NO: 357 - DNA, 1458 bp, synthetic construct
  misc_feature 1..1458: note = source = /note="Description of Artificial Sequence: Synthetic polynucleotide"
  source 1..1458: mol_type = other DNA
atggccctccctgtcaccgccctgctgcttccgctggctcttctgctccacgccgctcggcccgaagtgcagctcgtcgagagcggagggggactggtgcagcccggaggaagcctgaggctgtcctgcgctgcctccggctacaccttcacctcctactggatgaactgggtcagacaggcacctggaaagggactggtctgggtgtcgcgcattgacccctacgactccgaaacccattacaatcagaaattcaaggaccgcttcaccatctccgtggacaaagccaagagcaccgcgtacctccaaatgaactccctgcgcgctgaggatacagcagtgtactattgcgcccggggaaactgggatgattactggggccagggaactactgtgactgtgtcatccgggggtggcggtagcggaggagggggctccggcggcggcggctcagggggcggaggaagcgacgtggtcatgactcagtccccggactcactcgcggtgtcgcttggagagagagcgaccatcaactgtcgggcctcaaagagcatcagcaaggacctggcctggtaccagcagaagccgggacagccgccaaagctgctgatctactccgggtccaccttgcaatctggtgtccctgaccggttctccggttccgggtcgggtaccgacttcacgctcactatttcgtcgctgcaagccgaagatgtggccgtgtactattgccaacagcacaacaagtacccctacacttttggcggaggcaccaaggtggaaatcaagaccactaccccagcaccgaggccacccaccccggctcctaccatcgcctcccagcctctgtccctgcgtccggaggcatgtagacccgcagctggtggggccgtgcatacccggggtcttgacttcgcctgcgatatctacatttgggcccctctggctggtacttgcggggtcctgctgctttcactcgtgatcactctttactgtaagcgcggtcggaagaagctgctgtacatctttaagcaacccttcatgaggcctgtgcagactactcaagaggaggacggctgttcatgccggttcccagaggaggaggaaggcggctgcgaactgcgcgtgaaattcagccgcagcgcagatgctccagcctacaagcaggggcagaaccagctctacaacgaactcaatcttggtcggagagaggagtacgacgtgctggacaagcggagaggacgggacccagaaatgggcgggaagccgcgcagaaagaatccccaagagggcctgtacaacgagctccaaaaggataagatggcagaagcctatagcgagattggtatgaaaggggaacgcagaagaggcaaaggccacgacggactgtaccagggactcagcaccgccaccaaggacacctatgacgctcttcacatgcaggccctgccgcctcgg

SEQ ID NO: 358 - protein, 486 aa, synthetic construct
  REGION 1..486: note = source = /note="Description of Artificial Sequence: Synthetic polypeptide"
MALPVTALLLPLALLLHAARPEVQLVESGGGLVQPGGSLRLSCAASGYTFTSYWMNWVRQAPGKGLVWVSRIDPYDSETHYNQKFKDRFTISVDKAKSTAYLQMNSLRAEDTAVYYCARGNWDDYWGQGTTVTVSSGGGGSGGGGSGGGGSGGGGSDVVMTQSPDSLAVSLGERATINCRASKSISKDLAWYQQKPGQPPKLLIYSGSTLQSGVPDRFSGSGSGTDFTLTISSLQAEDVAVYYCQQHNKYPYTFGGGTKVEIKTTTPAPRPPTPAPTIASQPLSLRPEACRPAAGGAVHTRGLDFACDIYIWAPLAGTCGVLLLSLVITLYCKRGRKKLLYIFKQPFMRPVQTTQEEDGCSCRFPEEEEGGCELRVKFSRSADAPAYKQGQNQLYNELNLGRREEYDVLDKRRGRDPEMGGKPRRKNPQEGLYNELQKDKMAEAYSEIGMKGERRRGKGHDGLYQGLSTATKDTYDALHMQALPPR

SEQ ID NO: 359 - protein, 263 aa, synthetic construct
  REGION 1..263: note = source = /note="Description of Artificial Sequence: Synthetic polypeptide"
MALPVTALLLPLALLLHAARPEVQLVESGGGLVQPGGSLRLSCAASGYTFTSYWMNWVRQAPGKGLVWVSRIDPYDSETHYNQKFKDRFTISVDKAKSTAYLQMNSLRAEDTAVYYCARGNWDDYWGQGTTVTVSSGGGGSGGGGSGGGGSGGGGSDVVMTQSPDSLAVSLGERATINCRASKSISKDLAWYQQKPGQPPKLLIYSGSTLQSGVPDRFSGSGSGTDFTLTISSLQAEDVAVYYCQQHNKYPYTFGGGTKVEIK

SEQ ID NO: 360 - DNA, 1458 bp, synthetic construct
  misc_feature 1..1458: note = source = /note="Description of Artificial Sequence: Synthetic polynucleotide"
  source 1..1458: mol_type = other DNA
atggccctccctgtcaccgccctgctgcttccgctggctcttctgctccacgccgctcggcccgacgtgcagctcacccagtcgccctcatttctgtcggcctcagtgggagacagagtgaccattacttgtcgggcctccaagagcatctccaaggacctggcctggtatcagcagaagccaggaaaggcgcctaagttgctcatctactcggggtcgaccctgcaatctggcgtgccgtcccggttctccggttcgggaagcggtaccgaattcacccttactatctcctccctgcaaccggaggacttcgccacctactactgccaacagcacaacaagtacccgtacactttcgggggtggcacgaaggtcgaaatcaaggggggtggcggtagcggaggagggggctccggcggcggcggctcagggggcggaggaagcgaagtgcagctcgtcgagagcggagggggactggtgcagcccggaggaagcctgaggctgtcctgcgctgcctccggctacaccttcacctcctactggatgaactgggtcagacaggcacctggaaagggactggtctgggtgtcgcgcattgacccctacgactccgaaacccattacaatcagaaattcaaggaccgcttcaccatctccgtggacaaagccaagagcaccgcgtacctccaaatgaactccctgcgcgctgaggatacagcagtgtactattgcgcccggggaaactgggatgattactggggccagggaactactgtgactgtgtcatccaccactaccccagcaccgaggccacccaccccggctcctaccatcgcctcccagcctctgtccctgcgtccggaggcatgtagacccgcagctggtggggccgtgcatacccggggtcttgacttcgcctgcgatatctacatttgggcccctctggctggtacttgcggggtcctgctgctttcactcgtgatcactctttactgtaagcgcggtcggaagaagctgctgtacatctttaagcaacccttcatgaggcctgtgcagactactcaagaggaggacggctgttcatgccggttcccagaggaggaggaaggcggctgcgaactgcgcgtgaaattcagccgcagcgcagatgctccagcctacaagcaggggcagaaccagctctacaacgaactcaatcttggtcggagagaggagtacgacgtgctggacaagcggagaggacgggacccagaaatgggcgggaagccgcgcagaaagaatccccaagagggcctgtacaacgagctccaaaaggataagatggcagaagcctatagcgagattggtatgaaaggggaacgcagaagaggcaaaggccacgacggactgtaccagggactcagcaccgccaccaaggacacctatgacgctcttcacatgcaggccctgccgcctcgg

SEQ ID NO: 361 - protein, 486 aa, synthetic construct
  REGION 1..486: note = source = /note="Description of Artificial Sequence: Synthetic polypeptide"
MALPVTALLLPLALLLHAARPDVQLTQSPSFLSASVGDRVTITCRASKSISKDLAWYQQKPGKAPKLLIYSGSTLQSGVPSRFSGSGSGTEFTLTISSLQPEDFATYYCQQHNKYPYTFGGGTKVEIKGGGGSGGGGSGGGGSGGGGSEVQLVESGGGLVQPGGSLRLSCAASGYTFTSYWMNWVRQAPGKGLVWVSRIDPYDSETHYNQKFKDRFTISVDKAKSTAYLQMNSLRAEDTAVYYCARGNWDDYWGQGTTVTVSSTTTPAPRPPTPAPTIASQPLSLRPEACRPAAGGAVHTRGLDFACDIYIWAPLAGTCGVLLLSLVITLYCKRGRKKLLYIFKQPFMRPVQTTQEEDGCSCRFPEEEEGGCELRVKFSRSADAPAYKQGQNQLYNELNLGRREEYDVLDKRRGRDPEMGGKPRRKNPQEGLYNELQKDKMAEAYSEIGMKGERRRGKGHDGLYQGLSTATKDTYDALHMQALPPR

SEQ ID NO: 362 - protein, 263 aa, synthetic construct
  REGION 1..263: note = source = /note="Description of Artificial Sequence: Synthetic polypeptide"
MALPVTALLLPLALLLHAARPDVQLTQSPSFLSASVGDRVTITCRASKSISKDLAWYQQKPGKAPKLLIYSGSTLQSGVPSRFSGSGSGTEFTLTISSLQPEDFATYYCQQHNKYPYTFGGGTKVEIKGGGGSGGGGSGGGGSGGGGSEVQLVESGGGLVQPGGSLRLSCAASGYTFTSYWMNWVRQAPGKGLVWVSRIDPYDSETHYNQKFKDRFTISVDKAKSTAYLQMNSLRAEDTAVYYCARGNWDDYWGQGTTVTVSS

SEQ ID NO: 363 - DNA, 1458 bp, synthetic construct
  misc_feature 1..1458: note = source = /note="Description of Artificial Sequence: Synthetic polynucleotide"
  source 1..1458: mol_type = other DNA
atggccctccctgtcaccgccctgctgcttccgctggctcttctgctccacgccgctcggcccgaagtggtgctgacccagtcgcccgcaaccctctctctgtcgccgggagaacgcgccactctttcctgtcgggcgtccaagagcatctcaaaggacctcgcctggtaccagcagaagcctggtcaagccccgcggctgctgatctactccggctccacgctgcaatcaggaatcccagccagattttccggttcggggtcggggactgacttcaccttgaccattagctcgctggaacctgaggacttcgccgtgtattactgccagcagcacaacaagtacccgtacaccttcggaggcggtactaaggtcgagatcaaggggggtggcggtagcggaggagggggctccggcggcggcggctcagggggcggaggaagcgaagtgcagctcgtcgagagcggagggggactggtgcagcccggaggaagcctgaggctgtcctgcgctgcctccggctacaccttcacctcctactggatgaactgggtcagacaggcacctggaaagggactggtctgggtgtcgcgcattgacccctacgactccgaaacccattacaatcagaaattcaaggaccgcttcaccatctccgtggacaaagccaagagcaccgcgtacctccaaatgaactccctgcgcgctgaggatacagcagtgtactattgcgcccggggaaactgggatgattactggggccagggaactactgtgactgtgtcatccaccactaccccagcaccgaggccacccaccccggctcctaccatcgcctcccagcctctgtccctgcgtccggaggcatgtagacccgcagctggtggggccgtgcatacccggggtcttgacttcgcctgcgatatctacatttgggcccctctggctggtacttgcggggtcctgctgctttcactcgtgatcactctttactgtaagcgcggtcggaagaagctgctgtacatctttaagcaacccttcatgaggcctgtgcagactactcaagaggaggacggctgttcatgccggttcccagaggaggaggaaggcggctgcgaactgcgcgtgaaattcagccgcagcgcagatgctccagcctacaagcaggggcagaaccagctctacaacgaactcaatcttggtcggagagaggagtacgacgtgctggacaagcggagaggacgggacccagaaatgggcgggaagccgcgcagaaagaatccccaagagggcctgtacaacgagctccaaaaggataagatggcagaagcctatagcgagattggtatgaaaggggaacgcagaagaggcaaaggccacgacggactgtaccagggactcagcaccgccaccaaggacacctatgacgctcttcacatgcaggccctgccgcctcgg

SEQ ID NO: 364 - protein, 486 aa, synthetic construct
  REGION 1..486: note = source = /note="Description of Artificial Sequence: Synthetic polypeptide"
MALPVTALLLPLALLLHAARPEVVLTQSPATLSLSPGERATLSCRASKSISKDLAWYQQKPGQAPRLLIYSGSTLQSGIPARFSGSGSGTDFTLTISSLEPEDFAVYYCQQHNKYPYTFGGGTKVEIKGGGGSGGGGSGGGGSGGGGSEVQLVESGGGLVQPGGSLRLSCAASGYTFTSYWMNWVRQAPGKGLVWVSRIDPYDSETHYNQKFKDRFTISVDKAKSTAYLQMNSLRAEDTAVYYCARGNWDDYWGQGTTVTVSSTTTPAPRPPTPAPTIASQPLSLRPEACRPAAGGAVHTRGLDFACDIYIWAPLAGTCGVLLLSLVITLYCKRGRKKLLYIFKQPFMRPVQTTQEEDGCSCRFPEEEEGGCELRVKFSRSADAPAYKQGQNQLYNELNLGRREEYDVLDKRRGRDPEMGGKPRRKNPQEGLYNELQKDKMAEAYSEIGMKGERRRGKGHDGLYQGLSTATKDTYDALHMQALPPR

SEQ ID NO: 365 - protein, 263 aa, synthetic construct
  REGION 1..263: note = source = /note="Description of Artificial Sequence: Synthetic polypeptide"
MALPVTALLLPLALLLHAARPEVVLTQSPATLSLSPGERATLSCRASKSISKDLAWYQQKPGQAPRLLIYSGSTLQSGIPARFSGSGSGTDFTLTISSLEPEDFAVYYCQQHNKYPYTFGGGTKVEIKGGGGSGGGGSGGGGSGGGGSEVQLVESGGGLVQPGGSLRLSCAASGYTFTSYWMNWVRQAPGKGLVWVSRIDPYDSETHYNQKFKDRFTISVDKAKSTAYLQMNSLRAEDTAVYYCARGNWDDYWGQGTTVTVSS

SEQ ID NO: 366 - DNA, 1458 bp, synthetic construct
  misc_feature 1..1458: note = source = /note="Description of Artificial Sequence: Synthetic polynucleotide"
  source 1..1458: mol_type = other DNA
atggccctccctgtcaccgccctgctgcttccgctggctcttctgctccacgccgctcggcccgacgtcgtgatgacccagtcaccggcattcctgtccgtgactcccggagaaaaggtcacgattacttgccgggcgtccaagagcatctccaaggacctcgcctggtaccaacagaagccggaccaggcccctaagctgttgatctactcggggtccacccttcaatcgggagtgccatcgcggtttagcggttcgggttctgggaccgacttcactttcaccatctcctcactggaagccgaggatgccgccacttactactgtcagcagcacaacaagtatccgtacaccttcggaggcggtaccaaagtggagatcaaggggggtggcggtagcggaggagggggctccggcggcggcggctcagggggcggaggaagcgaagtgcagctcgtcgagagcggagggggactggtgcagcccggaggaagcctgaggctgtcctgcgctgcctccggctacaccttcacctcctactggatgaactgggtcagacaggcacctggaaagggactggtctgggtgtcgcgcattgacccctacgactccgaaacccattacaatcagaaattcaaggaccgcttcaccatctccgtggacaaagccaagagcaccgcgtacctccaaatgaactccctgcgcgctgaggatacagcagtgtactattgcgcccggggaaactgggatgattactggggccagggaactactgtgactgtgtcatccaccactaccccagcaccgaggccacccaccccggctcctaccatcgcctcccagcctctgtccctgcgtccggaggcatgtagacccgcagctggtggggccgtgcatacccggggtcttgacttcgcctgcgatatctacatttgggcccctctggctggtacttgcggggtcctgctgctttcactcgtgatcactctttactgtaagcgcggtcggaagaagctgctgtacatctttaagcaacccttcatgaggcctgtgcagactactcaagaggaggacggctgttcatgccggttcccagaggaggaggaaggcggctgcgaactgcgcgtgaaattcagccgcagcgcagatgctccagcctacaagcaggggcagaaccagctctacaacgaactcaatcttggtcggagagaggagtacgacgtgctggacaagcggagaggacgggacccagaaatgggcgggaagccgcgcagaaagaatccccaagagggcctgtacaacgagctccaaaaggataagatggcagaagcctatagcgagattggtatgaaaggggaacgcagaagaggcaaaggccacgacggactgtaccagggactcagcaccgccaccaaggacacctatgacgctcttcacatgcaggccctgccgcctcgg

SEQ ID NO: 367 - protein, 486 aa, synthetic construct
  REGION 1..486: note = source = /note="Description of Artificial Sequence: Synthetic polypeptide"
MALPVTALLLPLALLLHAARPDVVMTQSPAFLSVTPGEKVTITCRASKSISKDLAWYQQKPDQAPKLLIYSGSTLQSGVPSRFSGSGSGTDFTFTISSLEAEDAATYYCQQHNKYPYTFGGGTKVEIKGGGGSGGGGSGGGGSGGGGSEVQLVESGGGLVQPGGSLRLSCAASGYTFTSYWMNWVRQAPGKGLVWVSRIDPYDSETHYNQKFKDRFTISVDKAKSTAYLQMNSLRAEDTAVYYCARGNWDDYWGQGTTVTVSSTTTPAPRPPTPAPTIASQPLSLRPEACRPAAGGAVHTRGLDFACDIYIWAPLAGTCGVLLLSLVITLYCKRGRKKLLYIFKQPFMRPVQTTQEEDGCSCRFPEEEEGGCELRVKFSRSADAPAYKQGQNQLYNELNLGRREEYDVLDKRRGRDPEMGGKPRRKNPQEGLYNELQKDKMAEAYSEIGMKGERRRGKGHDGLYQGLSTATKDTYDALHMQALPPR

SEQ ID NO: 368 - protein, 263 aa, synthetic construct
  REGION 1..263: note = source = /note="Description of Artificial Sequence: Synthetic polypeptide"
MALPVTALLLPLALLLHAARPDVVMTQSPAFLSVTPGEKVTITCRASKSISKDLAWYQQKPDQAPKLLIYSGSTLQSGVPSRFSGSGSGTDFTFTISSLEAEDAATYYCQQHNKYPYTFGGGTKVEIKGGGGSGGGGSGGGGSGGGGSEVQLVESGGGLVQPGGSLRLSCAASGYTFTSYWMNWVRQAPGKGLVWVSRIDPYDSETHYNQKFKDRFTISVDKAKSTAYLQMNSLRAEDTAVYYCARGNWDDYWGQGTTVTVSS

SEQ ID NO: 369 - DNA, 1458 bp, synthetic construct
  misc_feature 1..1458: note = source = /note="Description of Artificial Sequence: Synthetic polynucleotide"
  source 1..1458: mol_type = other DNA
atggccctccctgtcaccgccctgctgcttccgctggctcttctgctccacgccgctcggcccgacgtggtcatgactcagtccccggactcactcgcggtgtcgcttggagagagagcgaccatcaactgtcgggcctcaaagagcatcagcaaggacctggcctggtaccagcagaagccgggacagccgccaaagctgctgatctactccgggtccaccttgcaatctggtgtccctgaccggttctccggttccgggtcgggtaccgacttcacgctcactatttcgtcgctgcaagccgaagatgtggccgtgtactattgccaacagcacaacaagtacccctacacttttggcggaggcaccaaggtggaaatcaaggggggtggcggtagcggaggagggggctccggcggcggcggctcagggggcggaggaagcgaagtgcagctcgtcgagagcggagggggactggtgcagcccggaggaagcctgaggctgtcctgcgctgcctccggctacaccttcacctcctactggatgaactgggtcagacaggcacctggaaagggactggtctgggtgtcgcgcattgacccctacgactccgaaacccattacaatcagaaattcaaggaccgcttcaccatctccgtggacaaagccaagagcaccgcgtacctccaaatgaactccctgcgcgctgaggatacagcagtgtactattgcgcccggggaaactgggatgattactggggccagggaactactgtgactgtgtcatccaccactaccccagcaccgaggccacccaccccggctcctaccatcgcctcccagcctctgtccctgcgtccggaggcatgtagacccgcagctggtggggccgtgcatacccggggtcttgacttcgcctgcgatatctacatttgggcccctctggctggtacttgcggggtcctgctgctttcactcgtgatcactctttactgtaagcgcggtcggaagaagctgctgtacatctttaagcaacccttcatgaggcctgtgcagactactcaagaggaggacggctgttcatgccggttcccagaggaggaggaaggcggctgcgaactgcgcgtgaaattcagccgcagcgcagatgctccagcctacaagcaggggcagaaccagctctacaacgaactcaatcttggtcggagagaggagtacgacgtgctggacaagcggagaggacgggacccagaaatgggcgggaagccgcgcagaaagaatccccaagagggcctgtacaacgagctccaaaaggataagatggcagaagcctatagcgagattggtatgaaaggggaacgcagaagaggcaaaggccacgacggactgtaccagggactcagcaccgccaccaaggacacctatgacgctcttcacatgcaggccctgccgcctcgg

SEQ ID NO: 370 - protein, 486 aa, synthetic construct
  REGION 1..486: note = source = /note="Description of Artificial Sequence: Synthetic polypeptide"
MALPVTALLLPLALLLHAARPDVVMTQSPDSLAVSLGERATINCRASKSISKDLAWYQQKPGQPPKLLIYSGSTLQSGVPDRFSGSGSGTDFTLTISSLQAEDVAVYYCQQHNKYPYTFGGGTKVEIKGGGGSGGGGSGGGGSGGGGSEVQLVESGGGLVQPGGSLRLSCAASGYTFTSYWMNWVRQAPGKGLVWVSRIDPYDSETHYNQKFKDRFTISVDKAKSTAYLQMNSLRAEDTAVYYCARGNWDDYWGQGTTVTVSSTTTPAPRPPTPAPTIASQPLSLRPEACRPAAGGAVHTRGLDFACDIYIWAPLAGTCGVLLLSLVITLYCKRGRKKLLYIFKQPFMRPVQTTQEEDGCSCRFPEEEEGGCELRVKFSRSADAPAYKQGQNQLYNELNLGRREEYDVLDKRRGRDPEMGGKPRRKNPQEGLYNELQKDKMAEAYSEIGMKGERRRGKGHDGLYQGLSTATKDTYDALHMQALPPR

SEQ ID NO: 371 - protein, 263 aa, synthetic construct
  REGION 1..263: note = source = /note="Description of Artificial Sequence: Synthetic polypeptide"
MALPVTALLLPLALLLHAARPDVVMTQSPDSLAVSLGERATINCRASKSISKDLAWYQQKPGQPPKLLIYSGSTLQSGVPDRFSGSGSGTDFTLTISSLQAEDVAVYYCQQHNKYPYTFGGGTKVEIKGGGGSGGGGSGGGGSGGGGSEVQLVESGGGLVQPGGSLRLSCAASGYTFTSYWMNWVRQAPGKGLVWVSRIDPYDSETHYNQKFKDRFTISVDKAKSTAYLQMNSLRAEDTAVYYCARGNWDDYWGQGTTVTVSS

SEQ ID NO: 372 - DNA, 729 bp, synthetic construct
  misc_feature 1..729: note = source = /note="Description of Artificial Sequence: Synthetic polynucleotide"
  source 1..729: mol_type = other DNA
caagtgcaactcgtccaaagcggagcggaagtcaagaaacccggagcgagcgtgaaagtgtcctgcaaagcctccggctacacctttacgggctactacatgcactgggtgcgccaggcaccaggacagggtcttgaatggatgggatggatcaaccctaattcgggcggaactaactacgcacagaagttccaggggagagtgactctgactcgggatacctccatctcaactgtctacatggaactctcccgcttgcggtcagatgatacggcagtgtactactgcgcccgcgacatgaatatcctggctaccgtgccgttcgacatctggggacaggggactatggttactgtctcatcgggcggtggaggttcaggaggaggcggctcgggaggcggaggttcggacattcagatgacccagtccccatcctctctgtcggccagcgtcggagatagggtgaccattacctgtcgggcctcgcaaagcatctcctcgtacctcaactggtatcagcaaaagccgggaaaggcgcctaagctgctgatctacgccgcttcgagcttgcaaagcggggtgccatccagattctcgggatcaggctcaggaaccgacttcaccctgaccgtgaacagcctccagccggaggactttgccacttactactgccagcagggagactccgtgccgcttactttcggggggggtacccgcctggagatcaag

SEQ ID NO: 373 - protein, 243 aa, synthetic construct
  REGION 1..243: note = source = /note="Description of Artificial Sequence: Synthetic polypeptide"
QVQLVQSGAEVKKPGASVKVSCKASGYTFTGYYMHWVRQAPGQGLEWMGWINPNSGGTNYAQKFQGRVTLTRDTSISTVYMELSRLRSDDTAVYYCARDMNILATVPFDIWGQGTMVTVSSGGGGSGGGGSGGGGSDIQMTQSPSSLSASVGDRVTITCRASQSISSYLNWYQQKPGKAPKLLIYAASSLQSGVPSRFSGSGSGTDFTLTVNSLQPEDFATYYCQQGDSVPLTFGGGTRLEIK

SEQ ID NO: 374 - DNA, 1760 bp, synthetic construct
  misc_feature 1..1760: note = source = /note="Description of Artificial Sequence: Synthetic polynucleotide"
  source 1..1760: mol_type = other DNA
atggccctccctgtcaccgccctgctgcttccgctggctcttctgctccacgccgctcggccccaagtgcaactcgtccaaagcggagcggaagtcaagaaacccggagcgagcgtgaaagtgtcctgcaaagcctccggctacacctttacgggctactacatgcactgggtgcgccaggcaccaggacagggtcttgaatggatgggatggatcaaccctaattcgggcggaactaactacgcacagaagttccaggggagagtgactctgactcgggatacctccatctcaactgtctacatggaactctcccgcttgcggtcagatgatacggcagtgtactactgcgcccgcgacatgaatatcctggctaccgtgccgttcgacatctggggacaggggactatggttactgtctcatcgggcggtggaggttcaggaggaggcggctcgggaggcggaggttcggacattcagatgacccagtccccatcctctctgtcggccagcgtcggagatagggtgaccattacctgtcgggcctcgcaaagcatctcctcgtacctcaactggtatcagcaaaagccgggaaaggcgcctaagctgctgatctacgccgcttcgagcttgcaaagcggggtgccatccagattctcgggatcaggctcaggaaccgacttcaccctgaccgtgaacagcctccagccggaggactttgccacttactactgccagcagggagactccgtgccgcttactttcggggggggtacccgcctggagatcaagaccactaccccagcaccgaggccacccaccccggctcctaccatcgcctcccagcctctgtccctgcgtccggaggcatgtagacccgcagctggtggggccgtgcatacccggggtcttgacttcgcctgcgatatctacatttgggcccctctggctggtacttgcggggtcctgctgctttcactcgtgatcactctttactgtaagcgcggtcggaagaagctgctgtacatctttaagcaacccttcatgaggcctgtgcagactactcaagaggaggacggctgttcttgccggttcccagaggaggaggaaggcggctgcgaactgcgcgtgaaattcagccgcagcgcagacgctccagcctacaagcaggggcagaaccagctctacaacgaactcaatcttggtcggagagaggagtacgacgtgctggacaagcggagaggacgggacccagaaatgggcgggaagccgcgcagaaagaatccccaagagggcctgtacaacgagctccaaaaggataagatggcagaagcctatagcgagattggtatgaaaggggaacgcagaagaggcaaaggccacgacggactgtaccagggactcagcaccgccaccaaggacacctatgacgctcttcacatgcaggccctgccgcctcggtaagtcgacagctcgctttcttgctgtccaatttctattaaaggttcctttgttccctaagtccaactactaaactgggggatattatgaagggccttgagcatctggattctgcctaataaaaaacatttattttcattgctgcgtcgagagctcgctttcttgctgtccaatttctattaaaggttcctttgttccctaagtccaactactaaactgggggatattatgaagggccttgagcatctggattctgcctaataaaaaacatttattttcattgctgcctcgacgaattc

SEQ ID NO: 375 - DNA, 729 bp, synthetic construct
  misc_feature 1..729: note = source = /note="Description of Artificial Sequence: Synthetic polynucleotide"
  source 1..729: mol_type = other DNA
caagtccaactcgttcaatccggcgcagaagtcaagaagccaggagcatcagtgaaagtgtcctgcaaagcctcaggctacatcttcacgggatactacatccactgggtgcgccaggctccgggccagggccttgagtggatgggctggatcaaccctaactctgggggaaccaactacgctcagaagttccaggggagggtcactatgactcgcgatacctccatctccactgcgtacatggaactctcgggactgagatccgacgatcctgccgtgtactactgcgcccgggacatgaacatcttggcgaccgtgccgtttgacatttggggacagggcaccctcgtcactgtgtcgagcggtggaggaggctcggggggtggcggatcaggagggggaggaagcgacatccagctgactcagagcccatcgtcgttgtccgcgtcggtgggggatagagtgaccattacttgccgcgccagccagagcatctcatcatatctgaattggtaccagcagaagcccggaaaggccccaaaactgctgatctacgctgcaagcagcctccaatcgggagtgccgtcacggttctccgggtccggttcgggaactgactttaccctgaccgtgaattcgctgcaaccggaggatttcgccacgtactactgtcagcaaggagactccgtgccgctgaccttcggtggaggcaccaaggtcgaaatcaag

SEQ ID NO: 376 - protein, 243 aa, synthetic construct
  REGION 1..243: note = source = /note="Description of Artificial Sequence: Synthetic polypeptide"
QVQLVQSGAEVKKPGASVKVSCKASGYIFTGYYIHWVRQAPGQGLEWMGWINPNSGGTNYAQKFQGRVTMTRDTSISTAYMELSGLRSDDPAVYYCARDMNILATVPFDIWGQGTLVTVSSGGGGSGGGGSGGGGSDIQLTQSPSSLSASVGDRVTITCRASQSISSYLNWYQQKPGKAPKLLIYAASSLQSGVPSRFSGSGSGTDFTLTVNSLQPEDFATYYCQQGDSVPLTFGGGTKVEIK

SEQ ID NO: 377 - DNA, 735 bp, synthetic construct
  misc_feature 1..735: note = source = /note="Description of Artificial Sequence: Synthetic polynucleotide"
  source 1..735: mol_type = other DNA
caagtccaactccaacagtcaggcgcagaagtgaaaaagagcggtgcatcggtgaaagtgtcatgcaaagcctcgggctacaccttcactgactactatatgcactggctgcggcaggcaccgggacagggacttgagtggatgggatggatcaacccgaattcaggggacactaactacgcgcagaagttccaggggagagtgaccctgacgagggacacctcaatttcgaccgtctacatggaattgtcgcgcctgagatcggacgatactgctgtgtactactgtgcccgcgacatgaacatcctcgcgactgtgccttttgatatctggggacaggggactatggtcaccgtttcctccgcttccggtggcggaggctcgggaggccgggcctccggtggaggaggcagcgacatccagatgactcagagcccttcctcgctgagcgcctcagtgggagatcgcgtgaccatcacttgccgggccagccagtccatttcgtcctacctcaattggtaccagcagaagccgggaaaggcgcccaagctcttgatctacgctgcgagctccctgcaaagcggggtgccgagccgattctcgggttccggctcgggaaccgacttcactctgaccatctcatccctgcaaccagaggactttgccacctactactgccaacaaggagattctgtcccactgacgttcggcggaggaaccaaggtcgaaatcaag

SEQ ID NO: 378 - protein, 245 aa, synthetic construct
  REGION 1..245: note = source = /note="Description of Artificial Sequence: Synthetic polypeptide"
QVQLQQSGAEVKKSGASVKVSCKASGYTFTDYYMHWLRQAPGQGLEWMGWINPNSGDTNYAQKFQGRVTLTRDTSISTVYMELSRLRSDDTAVYYCARDMNILATVPFDIWGQGTMVTVSSASGGGGSGGRASGGGGSDIQMTQSPSSLSASVGDRVTITCRASQSISSYLNWYQQKPGKAPKLLIYAASSLQSGVPSRFSGSGSGTDFTLTISSLQPEDFATYYCQQGDSVPLTFGGGTKVEIK

SEQ ID NO: 379 - protein, 243 aa, synthetic construct
  REGION 1..243: note = source = /note="Description of Artificial Sequence: Synthetic polypeptide"
QVQLVQSGAEVKKPGASVKVSCKASGYTFTGYYMHWVRQAPGQGLEWMGWINPNSGGTNYAQKFQGRVTMTRDTSISTAYMELSRLRSDDTAVYYCARDMNILATVPFDIWGQGTMVTVSSGGGGSGGGGSGGGGSDIQMTQSPSSLSASVGDRVTITCRASQSISTYLNWYQQKPGKAPNLLIYAAFSLQSGVPSRFSGSGSGTDFTLTINSLQPEDFATYYCQQGDSVPLTFGGGTKLEIK

SEQ ID NO: 380 - protein, 242 aa, synthetic construct
  REGION 1..242: note = source = /note="Description of Artificial Sequence: Synthetic polypeptide"
QVQLVQSGAEVKKPGASVKVSCKASGYTFTSYWMNWVRQAPGQGLEWMGRIDPYDSETHYNQKFKDRVTMTVDKSTSTAYMELSSLRSEDTAVYYCARGNWDDYWGQGTTVTVSSGGGGSGGGGSGGGGSGGGGSDVQLTQSPSFLSASVGDRVTITCRASKSISKDLAWYQQKPGKAPKLLIYSGSTLQSGVPSRFSGSGSGTEFTLTISSLQPEDFATYYCQQHNKYPYTFGGGTKVEIK

SEQ ID NO: 381 - protein, 242 aa, synthetic construct
  REGION 1..242: note = source = /note="Description of Artificial Sequence: Synthetic polypeptide"
QVQLVQSGAEVKKPGASVKVSCKASGYTFTSYWMNWVRQAPGQGLEWMGRIDPYDSETHYNQKFKDRVTMTVDKSTSTAYMELSSLRSEDTAVYYCARGNWDDYWGQGTTVTVSSGGGGSGGGGSGGGGSGGGGSEVVLTQSPATLSLSPGERATLSCRASKSISKDLAWYQQKPGQAPRLLIYSGSTLQSGIPARFSGSGSGTDFTLTISSLEPEDFAVYYCQQHNKYPYTFGGGTKVEIK

SEQ ID NO: 382 - protein, 242 aa, synthetic construct
  REGION 1..242: note = source = /note="Description of Artificial Sequence: Synthetic polypeptide"
QVQLVQSGAEVKKPGASVKVSCKASGYTFTSYWMNWVRQAPGQGLEWMGRIDPYDSETHYNQKFKDRVTMTVDKSTSTAYMELSSLRSEDTAVYYCARGNWDDYWGQGTTVTVSSGGGGSGGGGSGGGGSGGGGSDVVMTQSPAFLSVTPGEKVTITCRASKSISKDLAWYQQKPDQAPKLLIYSGSTLQSGVPSRFSGSGSGTDFTFTISSLEAEDAATYYCQQHNKYPYTFGGGTKVEIK

SEQ ID NO: 383 - protein, 242 aa, synthetic construct
  REGION 1..242: note = source = /note="Description of Artificial Sequence: Synthetic polypeptide"
QVQLVQSGAEVKKPGASVKVSCKASGYTFTSYWMNWVRQAPGQGLEWMGRIDPYDSETHYNQKFKDRVTMTVDKSTSTAYMELSSLRSEDTAVYYCARGNWDDYWGQGTTVTVSSGGGGSGGGGSGGGGSGGGGSDVVMTQSPDSLAVSLGERATINCRASKSISKDLAWYQQKPGQPPKLLIYSGSTLQSGVPDRFSGSGSGTDFTLTISSLQAEDVAVYYCQQHNKYPYTFGGGTKVEIK

SEQ ID NO: 384 - protein, 242 aa, synthetic construct
  REGION 1..242: note = source = /note="Description of Artificial Sequence: Synthetic polypeptide"
DVQLTQSPSFLSASVGDRVTITCRASKSISKDLAWYQQKPGKAPKLLIYSGSTLQSGVPSRFSGSGSGTEFTLTISSLQPEDFATYYCQQHNKYPYTFGGGTKVEIKGGGGSGGGGSGGGGSGGGGSQVQLVQSGAEVKKPGASVKVSCKASGYTFTSYWMNWVRQAPGQGLEWMGRIDPYDSETHYNQKFKDRVTMTVDKSTSTAYMELSSLRSEDTAVYYCARGNWDDYWGQGTTVTVSS

SEQ ID NO: 385 - protein, 242 aa, synthetic construct
  REGION 1..242: note = source = /note="Description of Artificial Sequence: Synthetic polypeptide"
EVVLTQSPATLSLSPGERATLSCRASKSISKDLAWYQQKPGQAPRLLIYSGSTLQSGIPARFSGSGSGTDFTLTISSLEPEDFAVYYCQQHNKYPYTFGGGTKVEIKGGGGSGGGGSGGGGSGGGGSQVQLVQSGAEVKKPGASVKVSCKASGYTFTSYWMNWVRQAPGQGLEWMGRIDPYDSETHYNQKFKDRVTMTVDKSTSTAYMELSSLRSEDTAVYYCARGNWDDYWGQGTTVTVSS

SEQ ID NO: 386 - protein, 242 aa, synthetic construct
  REGION 1..242: note = source = /note="Description of Artificial Sequence: Synthetic polypeptide"
DVVMTQSPAFLSVTPGEKVTITCRASKSISKDLAWYQQKPDQAPKLLIYSGSTLQSGVPSRFSGSGSGTDFTFTISSLEAEDAATYYCQQHNKYPYTFGGGTKVEIKGGGGSGGGGSGGGGSGGGGSQVQLVQSGAEVKKPGASVKVSCKASGYTFTSYWMNWVRQAPGQGLEWMGRIDPYDSETHYNQKFKDRVTMTVDKSTSTAYMELSSLRSEDTAVYYCARGNWDDYWGQGTTVTVSS

SEQ ID NO: 387 - protein, 242 aa, synthetic construct
  REGION 1..242: note = source = /note="Description of Artificial Sequence: Synthetic polypeptide"
DVVMTQSPDSLAVSLGERATINCRASKSISKDLAWYQQKPGQPPKLLIYSGSTLQSGVPDRFSGSGSGTDFTLTISSLQAEDVAVYYCQQHNKYPYTFGGGTKVEIKGGGGSGGGGSGGGGSGGGGSQVQLVQSGAEVKKPGASVKVSCKASGYTFTSYWMNWVRQAPGQGLEWMGRIDPYDSETHYNQKFKDRVTMTVDKSTSTAYMELSSLRSEDTAVYYCARGNWDDYWGQGTTVTVSS

SEQ ID NO: 388 - protein, 242 aa, synthetic construct
  REGION 1..242: note = source = /note="Description of Artificial Sequence: Synthetic polypeptide"
QVQLVQSGSELKKPGASVKVSCKASGYTFTSYWMNWVRQAPGQGLEWMGRIDPYDSETHYNQKFKDRFVFSVDKSVSTAYLQISSLKAEDTAVYYCARGNWDDYWGQGTTVTVSSGGGGSGGGGSGGGGSGGGGSDVQLTQSPSFLSASVGDRVTITCRASKSISKDLAWYQQKPGKAPKLLIYSGSTLQSGVPSRFSGSGSGTEFTLTISSLQPEDFATYYCQQHNKYPYTFGGGTKVEIK

SEQ ID NO: 389 - protein, 242 aa, synthetic construct
  REGION 1..242: note = source = /note="Description of Artificial Sequence: Synthetic polypeptide"
QVQLVQSGSELKKPGASVKVSCKASGYTFTSYWMNWVRQAPGQGLEWMGRIDPYDSETHYNQKFKDRFVFSVDKSVSTAYLQISSLKAEDTAVYYCARGNWDDYWGQGTTVTVSSGGGGSGGGGSGGGGSGGGGSEVVLTQSPATLSLSPGERATLSCRASKSISKDLAWYQQKPGQAPRLLIYSGSTLQSGIPARFSGSGSGTDFTLTISSLEPEDFAVYYCQQHNKYPYTFGGGTKVEIK

SEQ ID NO: 390 - protein, 242 aa, synthetic construct
  REGION 1..242: note = source = /note="Description of Artificial Sequence: Synthetic polypeptide"
QVQLVQSGSELKKPGASVKVSCKASGYTFTSYWMNWVRQAPGQGLEWMGRIDPYDSETHYNQKFKDRFVFSVDKSVSTAYLQISSLKAEDTAVYYCARGNWDDYWGQGTTVTVSSGGGGSGGGGSGGGGSGGGGSDVVMTQSPAFLSVTPGEKVTITCRASKSISKDLAWYQQKPDQAPKLLIYSGSTLQSGVPSRFSGSGSGTDFTFTISSLEAEDAATYYCQQHNKYPYTFGGGTKVEIK

SEQ ID NO: 391 - protein, 242 aa, synthetic construct
  REGION 1..242: note = source = /note="Description of Artificial Sequence: Synthetic polypeptide"
QVQLVQSGSELKKPGASVKVSCKASGYTFTSYWMNWVRQAPGQGLEWMGRIDPYDSETHYNQKFKDRFVFSVDKSVSTAYLQISSLKAEDTAVYYCARGNWDDYWGQGTTVTVSSGGGGSGGGGSGGGGSGGGGSDVVMTQSPDSLAVSLGERATINCRASKSISKDLAWYQQKPGQPPKLLIYSGSTLQSGVPDRFSGSGSGTDFTLTISSLQAEDVAVYYCQQHNKYPYTFGGGTKVEIK

SEQ ID NO: 392 - protein, 242 aa, synthetic construct
  REGION 1..242: note = source = /note="Description of Artificial Sequence: Synthetic polypeptide"
DVQLTQSPSFLSASVGDRVTITCRASKSISKDLAWYQQKPGKAPKLLIYSGSTLQSGVPSRFSGSGSGTEFTLTISSLQPEDFATYYCQQHNKYPYTFGGGTKVEIKGGGGSGGGGSGGGGSGGGGSQVQLVQSGSELKKPGASVKVSCKASGYTFTSYWMNWVRQAPGQGLEWMGRIDPYDSETHYNQKFKDRFVFSVDKSVSTAYLQISSLKAEDTAVYYCARGNWDDYWGQGTTVTVSS

SEQ ID NO: 393 - protein, 242 aa, synthetic construct
  REGION 1..242: note = source = /note="Description of Artificial Sequence: Synthetic polypeptide"
EVVLTQSPATLSLSPGERATLSCRASKSISKDLAWYQQKPGQAPRLLIYSGSTLQSGIPARFSGSGSGTDFTLTISSLEPEDFAVYYCQQHNKYPYTFGGGTKVEIKGGGGSGGGGSGGGGSGGGGSQVQLVQSGSELKKPGASVKVSCKASGYTFTSYWMNWVRQAPGQGLEWMGRIDPYDSETHYNQKFKDRFVFSVDKSVSTAYLQISSLKAEDTAVYYCARGNWDDYWGQGTTVTVSS

SEQ ID NO: 394 - protein, 242 aa, synthetic construct
  REGION 1..242: note = source = /note="Description of Artificial Sequence: Synthetic polypeptide"
DVVMTQSPAFLSVTPGEKVTITCRASKSISKDLAWYQQKPDQAPKLLIYSGSTLQSGVPSRFSGSGSGTDFTFTISSLEAEDAATYYCQQHNKYPYTFGGGTKVEIKGGGGSGGGGSGGGGSGGGGSQVQLVQSGSELKKPGASVKVSCKASGYTFTSYWMNWVRQAPGQGLEWMGRIDPYDSETHYNQKFKDRFVFSVDKSVSTAYLQISSLKAEDTAVYYCARGNWDDYWGQGTTVTVSS

SEQ ID NO: 395 - protein, 242 aa, synthetic construct
  REGION 1..242: note = source = /note="Description of Artificial Sequence: Synthetic polypeptide"
DVVMTQSPDSLAVSLGERATINCRASKSISKDLAWYQQKPGQPPKLLIYSGSTLQSGVPDRFSGSGSGTDFTLTISSLQAEDVAVYYCQQHNKYPYTFGGGTKVEIKGGGGSGGGGSGGGGSGGGGSQVQLVQSGSELKKPGASVKVSCKASGYTFTSYWMNWVRQAPGQGLEWMGRIDPYDSETHYNQKFKDRFVFSVDKSVSTAYLQISSLKAEDTAVYYCARGNWDDYWGQGTTVTVSS

SEQ ID NO: 396 - protein, 242 aa, synthetic construct
  REGION 1..242: note = source = /note="Description of Artificial Sequence: Synthetic polypeptide"
EVQLVQSGAEVKKPGESLRISCKGSGYTFTSYWMNWVRQMPGKGLEWMGRIDPYDSETHYNQKFKDHVTISVDKSISTAYLQWSSLKASDTAMYYCARGNWDDYWGQGTTVTVSSGGGGSGGGGSGGGGSGGGGSDVQLTQSPSFLSASVGDRVTITCRASKSISKDLAWYQQKPGKAPKLLIYSGSTLQSGVPSRFSGSGSGTEFTLTISSLQPEDFATYYCQQHNKYPYTFGGGTKVEIK

SEQ ID NO: 397 - protein, 242 aa, synthetic construct
  REGION 1..242: note = source = /note="Description of Artificial Sequence: Synthetic polypeptide"
EVQLVQSGAEVKKPGESLRISCKGSGYTFTSYWMNWVRQMPGKGLEWMGRIDPYDSETHYNQKFKDHVTISVDKSISTAYLQWSSLKASDTAMYYCARGNWDDYWGQGTTVTVSSGGGGSGGGGSGGGGSGGGGSEVVLTQSPATLSLSPGERATLSCRASKSISKDLAWYQQKPGQAPRLLIYSGSTLQSGIPARFSGSGSGTDFTLTISSLEPEDFAVYYCQQHNKYPYTFGGGTKVEIK

SEQ ID NO: 398 - protein, 242 aa, synthetic construct
  REGION 1..242: note = source = /note="Description of Artificial Sequence: Synthetic polypeptide"
EVQLVQSGAEVKKPGESLRISCKGSGYTFTSYWMNWVRQMPGKGLEWMGRIDPYDSETHYNQKFKDHVTISVDKSISTAYLQWSSLKASDTAMYYCARGNWDDYWGQGTTVTVSSGGGGSGGGGSGGGGSGGGGSDVVMTQSPAFLSVTPGEKVTITCRASKSISKDLAWYQQKPDQAPKLLIYSGSTLQSGVPSRFSGSGSGTDFTFTISSLEAEDAATYYCQQHNKYPYTFGGGTKVEIK

SEQ ID NO: 399 - protein, 242 aa, synthetic construct
  REGION 1..242: note = source = /note="Description of Artificial Sequence: Synthetic polypeptide"
EVQLVQSGAEVKKPGESLRISCKGSGYTFTSYWMNWVRQMPGKGLEWMGRIDPYDSETHYNQKFKDHVTISVDKSISTAYLQWSSLKASDTAMYYCARGNWDDYWGQGTTVTVSSGGGGSGGGGSGGGGSGGGGSDVVMTQSPDSLAVSLGERATINCRASKSISKDLAWYQQKPGQPPKLLIYSGSTLQSGVPDRFSGSGSGTDFTLTISSLQAEDVAVYYCQQHNKYPYTFGGGTKVEIK

SEQ ID NO: 400 - protein, 242 aa, synthetic construct
  REGION 1..242: note = source = /note="Description of Artificial Sequence: Synthetic polypeptide"
DVQLTQSPSFLSASVGDRVTITCRASKSISKDLAWYQQKPGKAPKLLIYSGSTLQSGVPSRFSGSGSGTEFTLTISSLQPEDFATYYCQQHNKYPYTFGGGTKVEIKGGGGSGGGGSGGGGSGGGGSEVQLVQSGAEVKKPGESLRISCKGSGYTFTSYWMNWVRQMPGKGLEWMGRIDPYDSETHYNQKFKDHVTISVDKSISTAYLQWSSLKASDTAMYYCARGNWDDYWGQGTTVTVSS

SEQ ID NO: 401 - protein, 242 aa, synthetic construct
  REGION 1..242: note = source = /note="Description of Artificial Sequence: Synthetic polypeptide"
EVVLTQSPATLSLSPGERATLSCRASKSISKDLAWYQQKPGQAPRLLIYSGSTLQSGIPARFSGSGSGTDFTLTISSLEPEDFAVYYCQQHNKYPYTFGGGTKVEIKGGGGSGGGGSGGGGSGGGGSEVQLVQSGAEVKKPGESLRISCKGSGYTFTSYWMNWVRQMPGKGLEWMGRIDPYDSETHYNQKFKDHVTISVDKSISTAYLQWSSLKASDTAMYYCARGNWDDYWGQGTTVTVSS

SEQ ID NO: 402 - protein, 242 aa, synthetic construct
  REGION 1..242: note = source = /note="Description of Artificial Sequence: Synthetic polypeptide"
DVVMTQSPAFLSVTPGEKVTITCRASKSISKDLAWYQQKPDQAPKLLIYSGSTLQSGVPSRFSGSGSGTDFTFTISSLEAEDAATYYCQQHNKYPYTFGGGTKVEIKGGGGSGGGGSGGGGSGGGGSEVQLVQSGAEVKKPGESLRISCKGSGYTFTSYWMNWVRQMPGKGLEWMGRIDPYDSETHYNQKFKDHVTISVDKSISTAYLQWSSLKASDTAMYYCARGNWDDYWGQGTTVTVSS

SEQ ID NO: 403 - protein, 242 aa, synthetic construct
  REGION 1..242: note = source = /note="Description of Artificial Sequence: Synthetic polypeptide"
DVVMTQSPDSLAVSLGERATINCRASKSISKDLAWYQQKPGQPPKLLIYSGSTLQSGVPDRFSGSGSGTDFTLTISSLQAEDVAVYYCQQHNKYPYTFGGGTKVEIKGGGGSGGGGSGGGGSGGGGSEVQLVQSGAEVKKPGESLRISCKGSGYTFTSYWMNWVRQMPGKGLEWMGRIDPYDSETHYNQKFKDHVTISVDKSISTAYLQWSSLKASDTAMYYCARGNWDDYWGQGTTVTVSS

SEQ ID NO: 404 - protein, 242 aa, synthetic construct
  REGION 1..242: note = source = /note="Description of Artificial Sequence: Synthetic polypeptide"
EVQLVESGGGLVQPGGSLRLSCAASGYTFTSYWMNWVRQAPGKGLVWVSRIDPYDSETHYNQKFKDRFTISVDKAKSTAYLQMNSLRAEDTAVYYCARGNWDDYWGQGTTVTVSSGGGGSGGGGSGGGGSGGGGSDVQLTQSPSFLSASVGDRVTITCRASKSISKDLAWYQQKPGKAPKLLIYSGSTLQSGVPSRFSGSGSGTEFTLTISSLQPEDFATYYCQQHNKYPYTFGGGTKVEIK

SEQ ID NO: 405 - protein, 242 aa, synthetic construct
  REGION 1..242: note = source = /note="Description of Artificial Sequence: Synthetic polypeptide"
EVQLVESGGGLVQPGGSLRLSCAASGYTFTSYWMNWVRQAPGKGLVWVSRIDPYDSETHYNQKFKDRFTISVDKAKSTAYLQMNSLRAEDTAVYYCARGNWDDYWGQGTTVTVSSGGGGSGGGGSGGGGSGGGGSEVVLTQSPATLSLSPGERATLSCRASKSISKDLAWYQQKPGQAPRLLIYSGSTLQSGIPARFSGSGSGTDFTLTISSLEPEDFAVYYCQQHNKYPYTFGGGTKVEIK

SEQ ID NO: 406 - protein, 242 aa, synthetic construct
  REGION 1..242: note = source = /note="Description of Artificial Sequence: Synthetic polypeptide"
EVQLVESGGGLVQPGGSLRLSCAASGYTFTSYWMNWVRQAPGKGLVWVSRIDPYDSETHYNQKFKDRFTISVDKAKSTAYLQMNSLRAEDTAVYYCARGNWDDYWGQGTTVTVSSGGGGSGGGGSGGGGSGGGGSDVVMTQSPAFLSVTPGEKVTITCRASKSISKDLAWYQQKPDQAPKLLIYSGSTLQSGVPSRFSGSGSGTDFTFTISSLEAEDAATYYCQQHNKYPYTFGGGTKVEIK

SEQ ID NO: 407 - protein, 242 aa, synthetic construct
  REGION 1..242: note = source = /note="Description of Artificial Sequence: Synthetic polypeptide"
EVQLVESGGGLVQPGGSLRLSCAASGYTFTSYWMNWVRQAPGKGLVWVSRIDPYDSETHYNQKFKDRFTISVDKAKSTAYLQMNSLRAEDTAVYYCARGNWDDYWGQGTTVTVSSGGGGSGGGGSGGGGSGGGGSDVVMTQSPDSLAVSLGERATINCRASKSISKDLAWYQQKPGQPPKLLIYSGSTLQSGVPDRFSGSGSGTDFTLTISSLQAEDVAVYYCQQHNKYPYTFGGGTKVEIK

SEQ ID NO: 408 - protein, 242 aa, synthetic construct
  REGION 1..242: note = source = /note="Description of Artificial Sequence: Synthetic polypeptide"
DVQLTQSPSFLSASVGDRVTITCRASKSISKDLAWYQQKPGKAPKLLIYSGSTLQSGVPSRFSGSGSGTEFTLTISSLQPEDFATYYCQQHNKYPYTFGGGTKVEIKGGGGSGGGGSGGGGSGGGGSEVQLVESGGGLVQPGGSLRLSCAASGYTFTSYWMNWVRQAPGKGLVWVSRIDPYDSETHYNQKFKDRFTISVDKAKSTAYLQMNSLRAEDTAVYYCARGNWDDYWGQGTTVTVSS

SEQ ID NO: 409 - protein, 242 aa, synthetic construct
  REGION 1..242: note = source = /note="Description of Artificial Sequence: Synthetic polypeptide"
EVVLTQSPATLSLSPGERATLSCRASKSISKDLAWYQQKPGQAPRLLIYSGSTLQSGIPARFSGSGSGTDFTLTISSLEPEDFAVYYCQQHNKYPYTFGGGTKVEIKGGGGSGGGGSGGGGSGGGGSEVQLVESGGGLVQPGGSLRLSCAASGYTFTSYWMNWVRQAPGKGLVWVSRIDPYDSETHYNQKFKDRFTISVDKAKSTAYLQMNSLRAEDTAVYYCARGNWDDYWGQGTTVTVSS

SEQ ID NO: 410 - protein, 242 aa, synthetic construct
  REGION 1..242: note = source = /note="Description of Artificial Sequence: Synthetic polypeptide"
DVVMTQSPAFLSVTPGEKVTITCRASKSISKDLAWYQQKPDQAPKLLIYSGSTLQSGVPSRFSGSGSGTDFTFTISSLEAEDAATYYCQQHNKYPYTFGGGTKVEIKGGGGSGGGGSGGGGSGGGGSEVQLVESGGGLVQPGGSLRLSCAASGYTFTSYWMNWVRQAPGKGLVWVSRIDPYDSETHYNQKFKDRFTISVDKAKSTAYLQMNSLRAEDTAVYYCARGNWDDYWGQGTTVTVSS

SEQ ID NO: 411 - protein, 242 aa, synthetic construct
  REGION 1..242: note = source = /note="Description of Artificial Sequence: Synthetic polypeptide"
DVVMTQSPDSLAVSLGERATINCRASKSISKDLAWYQQKPGQPPKLLIYSGSTLQSGVPDRFSGSGSGTDFTLTISSLQAEDVAVYYCQQHNKYPYTFGGGTKVEIKGGGGSGGGGSGGGGSGGGGSEVQLVESGGGLVQPGGSLRLSCAASGYTFTSYWMNWVRQAPGKGLVWVSRIDPYDSETHYNQKFKDRFTISVDKAKSTAYLQMNSLRAEDTAVYYCARGNWDDYWGQGTTVTVSS

SEQ ID NO: 412 - protein, 5 aa, synthetic construct
  REGION 1..5: note = source = /note="Description of Artificial Sequence: Synthetic peptide"
NHGMS

SEQ ID NO: 413 - protein, 5 aa, synthetic construct
  REGION 1..5: note = source = /note="Description of Artificial Sequence: Synthetic peptide"
NYAMS

SEQ ID NO: 414 - protein, 5 aa, synthetic construct
  REGION 1..5: note = source = /note="Description of Artificial Sequence: Synthetic peptide"
DYAMH

SEQ ID NO: 415 - protein, 5 aa, synthetic construct
  REGION 1..5: note = source = /note="Description of Artificial Sequence: Synthetic peptide"
NFGIN

SEQ ID NO: 416 - protein, 5 aa, synthetic construct
  REGION 1..5: note = source = /note="Description of Artificial Sequence: Synthetic peptide"
SDAMT

SEQ ID NO: 417 - protein, 5 aa, synthetic construct
  REGION 1..5: note = source = /note="Description of Artificial Sequence: Synthetic peptide"
NYGIT

SEQ ID NO: 418 - protein, 5 aa, synthetic construct
  REGION 1..5: note = source = /note="Description of Artificial Sequence: Synthetic peptide"
DYYMS

SEQ ID NO: 419 - protein, 7 aa, synthetic construct
  REGION 1..7: note = source = /note="Description of Artificial Sequence: Synthetic peptide"
SSYYYWG

SEQ ID NO: 420 - protein, 7 aa, synthetic construct
  REGION 1..7: note = source = /note="Description of Artificial Sequence: Synthetic peptide"
TSGMCVS

SEQ ID NO: 421 - protein, 5 aa, synthetic construct
  REGION 1..5: note = source = /note="Description of Artificial Sequence: Synthetic peptide"
SYSMN

SEQ ID NO: 422 - protein, 5 aa, synthetic construct
  REGION 1..5: note = source = /note="Description of Artificial Sequence: Synthetic peptide"
SHYIH

SEQ ID NO: 423 - protein, 7 aa, synthetic construct
  REGION 1..7: note = source = /note="Description of Artificial Sequence: Synthetic peptide"
SGGYYWS

SEQ ID NO: 424 - protein, 5 aa, synthetic construct
  REGION 1..5: note = source = /note="Description of Artificial Sequence: Synthetic peptide"
SYAIS

SEQ ID NO: 425 - protein, 7 aa, synthetic construct
  REGION 1..7: note = source = /note="Description of Artificial Sequence: Synthetic peptide"
SNSAAWN

SEQ ID NO: 426 - protein, 5 aa, synthetic construct
  REGION 1..5: note = source = /note="Description of Artificial Sequence: Synthetic peptide"
SYAMS

SEQ ID NO: 427 - protein, 5 aa, synthetic construct
  REGION 1..5: note = source = /note="Description of Artificial Sequence: Synthetic peptide"
RYPMS

SEQ ID NO: 428 - protein, 5 aa, synthetic construct
  REGION 1..5: note = source = /note="Description of Artificial Sequence: Synthetic peptide"
NFGMN

SEQ ID NO: 429 - protein, 5 aa, synthetic construct
  REGION 1..5: note = source = /note="Description of Artificial Sequence: Synthetic peptide"
DYSIN

SEQ ID NO: 430 - protein, 5 aa, synthetic construct
  REGION 1..5: note = source = /note="Description of Artificial Sequence: Synthetic peptide"
HYSMN

SEQ ID NO: 431 - protein, 16 aa, synthetic construct
  REGION 1..16: note = source = /note="Description of Artificial Sequence: Synthetic peptide"
GIVYSGSTYYAASVKG

SEQ ID NO: 432 - protein, 17 aa, synthetic construct
  REGION 1..17: note = source = /note="Description of Artificial Sequence: Synthetic peptide"
GISRSGENTYYADSVKG

SEQ ID NO: 433 - protein, 17 aa, synthetic construct
  REGION 1..17: note = source = /note="Description of Artificial Sequence: Synthetic peptide"
GISWNSGSIGYADSVKG

SEQ ID NO: 434 - protein, 17 aa, synthetic construct
  REGION 1..17: note = source = /note="Description of Artificial Sequence: Synthetic peptide"
WINPKNNNTNYAQKFQG

SEQ ID NO: 435 - protein, 17 aa, synthetic construct
  REGION 1..17: note = source = /note="Description of Artificial Sequence: Synthetic peptide"
VISGSGGTTYYADSVKG

SEQ ID NO: 436 - protein, 17 aa, synthetic construct
  REGION 1..17: note = source = /note="Description of Artificial Sequence: Synthetic peptide"
WISAYNGNTNYAQKFQG

SEQ ID NO: 437 - protein, 17 aa, synthetic construct
  REGION 1..17: note = source = /note="Description of Artificial Sequence: Synthetic peptide"
YISSSGSTIYYADSVKG

SEQ ID NO: 438 - protein, 17 aa, synthetic construct
  REGION 1..17: note = source = /note="Description of Artificial Sequence: Synthetic peptide"
YISSSGNTIYYADSVKG

SEQ ID NO: 439 - protein, 16 aa, synthetic construct
  REGION 1..16: note = source = /note="Description of Artificial Sequence: Synthetic peptide"
SIYYSGSAYYNPSLKS

SEQ ID NO: 440 - protein, 16 aa, synthetic construct
  REGION 1..16: note = source = /note="Description of Artificial Sequence: Synthetic peptide"
RIDWDEDKFYSTSLKT

SEQ ID NO: 441 - protein, 17 aa, synthetic construct
  REGION 1..17: note = source = /note="Description of Artificial Sequence: Synthetic peptide"
SISSSSSYIYYADSVKG

SEQ ID NO: 442 - protein, 17 aa, synthetic construct
  REGION 1..17: note = source = /note="Description of Artificial Sequence: Synthetic peptide"
MINPSGGVTAYSQTLQG

SEQ ID NO: 443 - protein, 16 aa, synthetic construct
  REGION 1..16: note = source = /note="Description of Artificial Sequence: Synthetic peptide"
YIYYSGSTYYNPSLKS

SEQ ID NO: 444 - protein, 17 aa, synthetic construct
  REGION 1..17: note = source = /note="Description of Artificial Sequence: Synthetic peptide"
GIIPIFGTANYAQKFQG

SEQ ID NO: 445 - protein, 18 aa, synthetic construct
  REGION 1..18: note = source = /note="Description of Artificial Sequence: Synthetic peptide"
RTYYRSKWYSFYAISLKS

SEQ ID NO: 446 - protein, 17 aa, synthetic construct
  REGION 1..17: note = source = /note="Description of Artificial Sequence: Synthetic peptide"
AISGSGGSTYYADSVKG

SEQ ID NO: 447 - protein, 17 aa, synthetic construct
  REGION 1..17: note = source = /note="Description of Artificial Sequence: Synthetic peptide"
GISDSGVSTYYADSAKG

SEQ ID NO: 448 - protein, 17 aa, synthetic construct
  REGION 1..17: note = source = /note="Description of Artificial Sequence: Synthetic peptide"
SINWKGNSLAYGDSVKG

SEQ ID NO: 449 - protein, 17 aa, synthetic construct
  REGION 1..17: note = source = /note="Description of Artificial Sequence: Synthetic peptide"
WINTYTGESYFADDFKG

SEQ ID NO: 450 - protein, 17 aa, synthetic construct
  REGION 1..17: note = source = /note="Description of Artificial Sequence: Synthetic peptide"
WINTETREPAYAYDFRG

SEQ ID NO: 451 - protein, 17 aa, synthetic construct
  REGION 1..17: note = source = /note="Description of Artificial Sequence: Synthetic peptide"
RINTESGVPIYADDFKG

SEQ ID NO: 452 - protein, 17 aa, synthetic construct
  REGION 1..17: note = source = /note="Description of Artificial Sequence: Synthetic peptide"
RINTETGEPLYADDFKG

SEQ ID NO: 453 - protein, 7 aa, synthetic construct
  REGION 1..7: note = source = /note="Description of Artificial Sequence: Synthetic peptide"
HGGESDV

SEQ ID NO: 454 - protein, 11 aa, synthetic construct
  REGION 1..11: note = source = /note="Description of Artificial Sequence: Synthetic peptide"
SPAHYYGGMDV

SEQ ID NO: 455 - protein, 6 aa, synthetic construct
  REGION 1..6: note = source = /note="Description of Artificial Sequence: Synthetic peptide"
HSFLAY

SEQ ID NO: 456 - protein, 11 aa, synthetic construct
  REGION 1..11: note = source = /note="Description of Artificial Sequence: Synthetic peptide"
GPYYYQSYMDV

SEQ ID NO: 457 - protein, 14 aa, synthetic construct
  REGION 1..14: note = source = /note="Description of Artificial Sequence: Synthetic peptide"
LDSSGYYYARGPRY

SEQ ID NO: 458 - protein, 9 aa, synthetic construct
  REGION 1..9: note = source = /note="Description of Artificial Sequence: Synthetic peptide"
GPYYYYMDV

SEQ ID NO: 459 - protein, 8 aa, synthetic construct
  REGION 1..8: note = source = /note="Description of Artificial Sequence: Synthetic peptide"
ESGDGMDV

SEQ ID NO: 460 - protein, 8 aa, synthetic construct
  REGION 1..8: note = source = /note="Description of Artificial Sequence: Synthetic peptide"
STMVREDY

SEQ ID NO: 461 - protein, 11 aa, synthetic construct
  REGION 1..11: note = source = /note="Description of Artificial Sequence: Synthetic peptide"
HWQEWPDAFDI

SEQ ID NO: 462 - protein, 13 aa, synthetic construct
  REGION 1..13: note = source = /note="Description of Artificial Sequence: Synthetic peptide"
SGAGGTSATAFDI

SEQ ID NO: 463 - protein, 10 aa, synthetic construct
  REGION 1..10: note = source = /note="Description of Artificial Sequence: Synthetic peptide"
TIAAVYAFDI

SEQ ID NO: 464 - protein, 8 aa, synthetic construct
  REGION 1..8: note = source = /note="Description of Artificial Sequence: Synthetic peptide"
DLRGAFDI

SEQ ID NO: 465 - protein, 11 aa, synthetic construct
  REGION 1..11: note = source = /note="Description of Artificial Sequence: Synthetic peptide"
EGSGSGWYFDF

SEQ ID NO: 466 - protein, 13 aa, synthetic construct
  REGION 1..13: note = source = /note="Description of Artificial Sequence: Synthetic peptide"
AGIAARLRGAFDI

SEQ ID NO: 467 - protein, 20 aa, synthetic construct
  REGION 1..20: note = source = /note="Description of Artificial Sequence: Synthetic peptide"
RGGYQLLRWDVGLLRSAFDI

SEQ ID NO: 468 - protein, 13 aa, synthetic construct
  REGION 1..13: note = source = /note="Description of Artificial Sequence: Synthetic peptide"
SSPEGLFLYWFDP

SEQ ID NO: 469 - protein, 9 aa, synthetic construct
  REGION 1..9: note = source = /note="Description of Artificial Sequence: Synthetic peptide"
VEGSGSLDY

SEQ ID NO: 470 - protein, 9 aa, synthetic construct
  REGION 1..9: note = source = /note="Description of Artificial Sequence: Synthetic peptide"
RAGSEASDI

SEQ ID NO: 471 - protein, 15 aa, synthetic construct
  REGION 1..15: note = source = /note="Description of Artificial Sequence: Synthetic peptide"
ATYKRELRYYYGMDV

SEQ ID NO: 472 - protein, 8 aa, synthetic construct
  REGION 1..8: note = source = /note="Description of Artificial Sequence: Synthetic peptide"
VGKAVPDV

SEQ ID NO: 473 - protein, 13 aa, synthetic construct
  REGION 1..13: note = source = /note="Description of Artificial Sequence: Synthetic peptide"
HQGVAYYNYAMDV

SEQ ID NO: 474 - protein, 8 aa, synthetic construct
  REGION 1..8: note = source = /note="Description of Artificial Sequence: Synthetic peptide"
VVRDGMDV

SEQ ID NO: 475 - protein, 9 aa, synthetic construct
  REGION 1..9: note = source = /note="Description of Artificial Sequence: Synthetic peptide"
IPQTGTFDY

SEQ ID NO: 476 - protein, 15 aa, synthetic construct
  REGION 1..15: note = source = /note="Description of Artificial Sequence: Synthetic peptide"
ANYKRELRYYYGMDV

SEQ ID NO: 477 - protein, 11 aa, synthetic construct
  REGION 1..11: note = source = /note="Description of Artificial Sequence: Synthetic peptide"
ALVGATGAFDI

SEQ ID NO: 478 - protein, 8 aa, synthetic construct
  REGION 1..8: note = source = /note="Description of Artificial Sequence: Synthetic peptide"
WFGEGFDP

SEQ ID NO: 479 - protein, 17 aa, synthetic construct
  REGION 1..17: note = source = /note="Description of Artificial Sequence: Synthetic peptide"
VGYDSSGYYRDYYGMDV

SEQ ID NO: 480 - protein, 13 aa, synthetic construct
  REGION 1..13: note = source = /note="Description of Artificial Sequence: Synthetic peptide"
MGWSSGYLGAFDI

SEQ ID NO: 481 - protein, 13 aa, synthetic construct
  REGION 1..13: note = source = /note="Description of Artificial Sequence: Synthetic peptide"
GEIYYGYDGGFAY

SEQ ID NO: 482 - protein, 8 aa, synthetic construct
  REGION 1..8: note = source = /note="Description of Artificial Sequence: Synthetic peptide"
DYSYAMDY

SEQ ID NO: 483 - protein, 8 aa, synthetic construct
  REGION 1..8: note = source = /note="Description of Artificial Sequence: Synthetic peptide"
DYLYSLDF

SEQ ID NO: 484 - protein, 8 aa, synthetic construct
  REGION 1..8: note = source = /note="Description of Artificial Sequence: Synthetic peptide"
DYLYSCDY

SEQ ID NO: 485 - protein, 12 aa, synthetic construct
  REGION 1..12: note = source = /note="Description of Artificial Sequence: Synthetic peptide"
RASQSISSSFLA

SEQ ID NO: 486 - protein, 16 aa, synthetic construct
  REGION 1..16: note = source = /note="Description of Artificial Sequence: Synthetic peptide"
RSSQSLLHSNGYNYLD

SEQ ID NO: 487 - protein, 16 aa, synthetic construct
  REGION 1..16: note = source = /note="Description of Artificial Sequence: Synthetic peptide"
KSSQSLLRNDGKTPLY

SEQ ID NO: 488 - protein, 16 aa, synthetic construct
  REGION 1..16: note = source = /note="Description of Artificial Sequence: Synthetic peptide"
RSSQSLLHSNGYNYLN

SEQ ID NO: 489 - protein, 16 aa, synthetic construct
  REGION 1..16: note = source = /note="Description of Artificial Sequence: Synthetic peptide"
RSSQSLLYSNGYNYVD

SEQ ID NO: 490 - protein, 11 aa, synthetic construct
  REGION 1..11: note = source = /note="Description of Artificial Sequence: Synthetic peptide"
RASQSVSSNLA

SEQ ID NO: 491 - protein, 11 aa, synthetic construct
  REGION 1..11: note = source = /note="Description of Artificial Sequence: Synthetic peptide"
RASQSVSSKLA

SEQ ID NO: 492 - protein, 12 aa, synthetic construct
  REGION 1..12: note = source = /note="Description of Artificial Sequence: Synthetic peptide"
RASQSVGSTNLA

SEQ ID NO: 493 - protein, 16 aa, synthetic construct
  REGION 1..16: note = source = /note="Description of Artificial Sequence: Synthetic peptide"
KSSESLVHNSGKTYLN

SEQ ID NO: 494 - protein, 11 aa, synthetic construct
  REGION 1..11: note = source = /note="Description of Artificial Sequence: Synthetic peptide"
QASEDINKFLN

SEQ ID NO: 495 - protein, 11 aa, synthetic construct
  REGION 1..11: note = source = /note="Description of Artificial Sequence: Synthetic peptide"
RASQSVGSNLA

SEQ ID NO: 496 - protein, 12 aa, synthetic construct
  REGION 1..12: note = source = /note="Description of Artificial Sequence: Synthetic peptide"
RASQSIGSSSLA

SEQ ID NO: 497 - protein, 11 aa, synthetic construct
  REGION 1..11: note = source = /note="Description of Artificial Sequence: Synthetic peptide"
KASQDIDDAMN

SEQ ID NO: 498 - protein, 11 aa, synthetic construct
  REGION 1..11: note = source = /note="Description of Artificial Sequence: Synthetic peptide"
RASQDIYNNLA

SEQ ID NO: 499 - protein, 11 aa, synthetic construct
  REGION 1..11: note = source = /note="Description of Artificial Sequence: Synthetic peptide"
GGNNIGTKSVH

SEQ ID NO: 500 - protein, 11 aa, synthetic construct
  REGION 1..11: note = source = /note="Description of Artificial Sequence: Synthetic peptide"
SGDGLSKKYVS

SEQ ID NO: 501 - protein, 11 aa, synthetic construct
  REGION 1..11: note = source = /note="Description of Artificial Sequence: Synthetic peptide"
RASQGIRNWLA

SEQ ID NO: 502 - protein, 11 aa, synthetic construct
  REGION 1..11: note = source = /note="Description of Artificial Sequence: Synthetic peptide"
GGNNIGSKSVH

SEQ ID NO: 503 - protein, 11 aa, synthetic construct
  REGION 1..11: note = source = /note="Description of Artificial Sequence: Synthetic peptide"
QGDSLGNYYAT

SEQ ID NO: 504 - protein, 12 aa, synthetic construct
  REGION 1..12: note = source = /note="Description of Artificial Sequence: Synthetic peptide"
RASQSVSSAYLA

SEQ ID NO: 505 - protein, 11 aa, synthetic construct
  REGION 1..11: note = source = /note="Description of Artificial Sequence: Synthetic peptide"
RASQSVSNSLA

SEQ ID NO: 506 - protein, 12 aa, synthetic construct
  REGION 1..12: note = source = /note="Description of Artificial Sequence: Synthetic peptide"
RASQSVSSSFLA

SEQ ID NO: 507 - protein, 12 aa, synthetic construct
  REGION 1..12: note = source = /note="Description of Artificial Sequence: Synthetic peptide"
RASQSVSTTFLA

SEQ ID NO: 508 - protein, 12 aa, synthetic construct
  REGION 1..12: note = source = /note="Description of Artificial Sequence: Synthetic peptide"
RATQSIGSSFLA

SEQ ID NO: 509 - protein, 12 aa, synthetic construct
  REGION 1..12: note = source = /note="Description of Artificial Sequence: Synthetic peptide"
RASQSVSSSYLA

SEQ ID NO: 510 - protein, 12 aa, synthetic construct
  REGION 1..12: note = source = /note="Description of Artificial Sequence: Synthetic peptide"
RASQRVASNYLA

SEQ ID NO: 511 - protein, 12 aa, synthetic construct
  REGION 1..12: note = source = /note="Description of Artificial Sequence: Synthetic peptide"
RASQSLSSNFLA

SEQ ID NO: 512 - protein, 12 aa, synthetic construct
  REGION 1..12: note = source = /note="Description of Artificial Sequence: Synthetic peptide"
RASQSVASSFLA

SEQ ID NO: 513 - protein, 11 aa, synthetic construct
  REGION 1..11: note = source = /note="Description of Artificial Sequence: Synthetic peptide"
RASQDVNTAVS

SEQ ID NO: 514 - protein, 15 aa, synthetic construct
  REGION 1..15: note = source = /note="Description of Artificial Sequence: Synthetic peptide"
RASESVSVIGAHLIH

SEQ ID NO: 515 - protein, 15 aa, synthetic construct
  REGION 1..15: note = source = /note="Description of Artificial Sequence: Synthetic peptide"
RASESVTILGSHLIY

SEQ ID NO: 516 - protein, 7 aa, synthetic construct
  REGION 1..7: note = source = /note="Description of Artificial Sequence: Synthetic peptide"
GASRRAT

SEQ ID NO: 517 - protein, 7 aa, synthetic construct
  REGION 1..7: note = source = /note="Description of Artificial Sequence: Synthetic peptide"
LGSNRAS

SEQ ID NO: 518 - protein, 7 aa, synthetic construct
  REGION 1..7: note = source = /note="Description of Artificial Sequence: Synthetic peptide"
EVSNRFS

SEQ ID NO: 519 - protein, 7 aa, synthetic construct
  REGION 1..7: note = source = /note="Description of Artificial Sequence: Synthetic peptide"
LGSKRAS

SEQ ID NO: 520 - protein, 7 aa, synthetic construct
  REGION 1..7: note = source = /note="Description of Artificial Sequence: Synthetic peptide"
GASTLAS

SEQ ID NO: 521 - protein, 7 aa, synthetic construct
  REGION 1..7: note = source = /note="Description of Artificial Sequence: Synthetic peptide"
GASTRAS

SEQ ID NO: 522 - protein, 7 aa, synthetic construct
  REGION 1..7: note = source = /note="Description of Artificial Sequence: Synthetic peptide"
GASIRAT

SEQ ID NO: 523 - protein, 7 aa, synthetic construct
  REGION 1..7: note = source = /note="Description of Artificial Sequence: Synthetic peptide"
DASNRAT

SEQ ID NO: 524 - protein, 7 aa, synthetic construct
  REGION 1..7: note = source = /note="Description of Artificial Sequence: Synthetic peptide"
EVSNRDS

SEQ ID NO: 525 - protein, 7 aa, synthetic construct
  REGION 1..7: note = source = /note="Description of Artificial Sequence: Synthetic peptide"
DASTLQT

SEQ ID NO: 526 - protein, 7 aa, synthetic construct
  REGION 1..7: note = source = /note="Description of Artificial Sequence: Synthetic peptide"
GASTRAT

SEQ ID NO: 527 - protein, 7 aa, synthetic construct
  REGION 1..7: note = source = /note="Description of Artificial Sequence: Synthetic peptide"
GASSRAS

SEQ ID NO: 528 - protein, 7 aa, synthetic construct
  REGION 1..7: note = source = /note="Description of Artificial Sequence: Synthetic peptide"
SATSPVP

SEQ ID NO: 529 - protein, 7 aa, synthetic construct
  REGION 1..7: note = source = /note="Description of Artificial Sequence: Synthetic peptide"
AANKSQS

SEQ ID NO: 530 - protein, 7 aa, synthetic construct
  REGION 1..7: note = source = /note="Description of Artificial Sequence: Synthetic peptide"
DDSVRPS

SEQ ID NO: 531 - protein, 7 aa, synthetic construct
  REGION 1..7: note = source = /note="Description of Artificial Sequence: Synthetic peptide"
RDKERPS

SEQ ID NO: 532 - protein, 7 aa, synthetic construct
  REGION 1..7: note = source = /note="Description of Artificial Sequence: Synthetic peptide"
AASNLQS

SEQ ID NO: 533 - protein, 7 aa, synthetic construct
  REGION 1..7: note = source = /note="Description of Artificial Sequence: Synthetic peptide"
GKNNRPS

SEQ ID NO: 534 - protein, 7 aa, synthetic construct
  REGION 1..7: note = source = /note="Description of Artificial Sequence: Synthetic peptide"
GTNNRPS

SEQ ID NO: 535 - protein, 7 aa, synthetic construct
  REGION 1..7: note = source = /note="Description of Artificial Sequence: Synthetic peptide"
DASSRAT

SEQ ID NO: 536 - protein, 7 aa, synthetic construct
  REGION 1..7: note = source = /note="Description of Artificial Sequence: Synthetic peptide"
GASSRAT

SEQ ID NO: 537 - protein, 7 aa, synthetic construct
  REGION 1..7: note = source = /note="Description of Artificial Sequence: Synthetic peptide"
GSSNRAT

SEQ ID NO: 538 - protein, 7 aa, synthetic construct
  REGION 1..7: note = source = /note="Description of Artificial Sequence: Synthetic peptide"
GASQRAT

SEQ ID NO: 539 - protein, 7 aa, synthetic construct
  REGION 1..7: note = source = /note="Description of Artificial Sequence: Synthetic peptide"
GASNWAT

SEQ ID NO: 540 - protein, 7 aa, synthetic construct
  REGION 1..7: note = source = /note="Description of Artificial Sequence: Synthetic peptide"
GTSSRAT

SEQ ID NO: 541 - protein, 7 aa, synthetic construct
  REGION 1..7: note = source = /note="Description of Artificial Sequence: Synthetic peptide"
GASGRAT

SEQ ID NO: 542 - protein, 7 aa, synthetic construct
  REGION 1..7: note = source = /note="Description of Artificial Sequence: Synthetic peptide"
SASYRYT

SEQ ID NO: 543 - protein, 7 aa, synthetic construct
  REGION 1..7: note = source = /note="Description of Artificial Sequence: Synthetic peptide"
LASNLET

SEQ ID NO: 544 - protein, 7 aa, synthetic construct
  REGION 1..7: note = source = /note="Description of Artificial Sequence: Synthetic peptide"
LASNVQT

SEQ ID NO: 545 - protein, 9 aa, synthetic construct
  REGION 1..9: note = source = /note="Description of Artificial Sequence: Synthetic peptide"
QQSYSTPYT

SEQ ID NO: 546 - protein, 10 aa, synthetic construct
  REGION 1..10: note = source = /note="Description of Artificial Sequence: Synthetic peptide"
QQYHSSPSWT

SEQ ID NO: 547 - protein, 9 aa, synthetic construct
  REGION 1..9: note = source = /note="Description of Artificial Sequence: Synthetic peptide"
MQALQTPYT

SEQ ID NO: 548 - protein, 8 aa, synthetic construct
  REGION 1..8: note = source = /note="Description of Artificial Sequence: Synthetic peptide"
MQNIQFPS

SEQ ID NO: 549 - protein, 8 aa, synthetic construct
  REGION 1..8: note = source = /note="Description of Artificial Sequence: Synthetic peptide"
QQSYKRAS

SEQ ID NO: 550 - protein, 9 aa, synthetic construct
  REGION 1..9: note = source = /note="Description of Artificial Sequence: Synthetic peptide"
MQGRQFPYS

SEQ ID NO: 551 - protein, 8 aa, synthetic construct
  REGION 1..8: note = source = /note="Description of Artificial Sequence: Synthetic peptide"
QQYGSSLT

SEQ ID NO: 552 - protein, 9 aa, synthetic construct
  REGION 1..9: note = source = /note="Description of Artificial Sequence: Synthetic peptide"
QQYGSSSWT

SEQ ID NO: 553 - protein, 10 aa, synthetic construct
  REGION 1..10: note = source = /note="Description of Artificial Sequence: Synthetic peptide"
QQYGSSPPWT

SEQ ID NO: 554 - protein, 7 aa, synthetic construct
  REGION 1..7: note = source = /note="Description of Artificial Sequence: Synthetic peptide"
QQSYTLA

SEQ ID NO: 555 - protein, 9 aa, synthetic construct
  REGION 1..9: note = source = /note="Description of Artificial Sequence: Synthetic peptide"
MQGTHWPGT

SEQ ID NO: 556 - protein, 9 aa, synthetic construct
  REGION 1..9: note = source = /note="Description of Artificial Sequence: Synthetic peptide"
QQYESLPLT

SEQ ID NO: 557 - protein, 10 aa, synthetic construct
  REGION 1..10: note = source = /note="Description of Artificial Sequence: Synthetic peptide"
QQYNDWLPVT

SEQ ID NO: 558 - protein, 10 aa, synthetic construct
  REGION 1..10: note = source = /note="Description of Artificial Sequence: Synthetic peptide"
QQYAGSPPFT

SEQ ID NO: 559 - protein, 9 aa, synthetic construct
  REGION 1..9: note = source = /note="Description of Artificial Sequence: Synthetic peptide"
LQHDNFPLT

SEQ ID NO: 560 - protein, 9 aa, synthetic construct
  REGION 1..9: note = source = /note="Description of Artificial Sequence: Synthetic peptide"
QHYYRFPYS

SEQ ID NO: 561 - protein, 11 aa, synthetic construct
  REGION 1..11: note = source = /note="Description of Artificial Sequence: Synthetic peptide"
QVWDSDSEHVV

SEQ ID NO: 562 - protein, 9 aa, synthetic construct
  REGION 1..9: note = source = /note="Description of Artificial Sequence: Synthetic peptide"
QAWDDTTVV

SEQ ID NO: 563 - protein, 9 aa, synthetic construct
  REGION 1..9: note = source = /note="Description of Artificial Sequence: Synthetic peptide"
QKYNSAPFT

SEQ ID NO: 564 - protein, 12 aa, synthetic construct
  REGION 1..12: note = source = /note="Description of Artificial Sequence: Synthetic peptide"
SSRDSSGDHLRV

SEQ ID NO: 565 - protein, 11 aa, synthetic construct
  REGION 1..11: note = source = /note="Description of Artificial Sequence: Synthetic peptide"
NSRDSSGHHLL

SEQ ID NO: 566 - protein, 14 aa, synthetic construct
  REGION 1..14: note = source = /note="Description of Artificial Sequence: Synthetic peptide"
QHYGSSFNGSSLFT

SEQ ID NO: 567 - protein, 10 aa, synthetic construct
  REGION 1..10: note = source = /note="Description of Artificial Sequence: Synthetic peptide"
QQFGTSSGLT

SEQ ID NO: 568 - protein, 9 aa, synthetic construct
  REGION 1..9: note = source = /note="Description of Artificial Sequence: Synthetic peptide"
QQSYSTPYS

SEQ ID NO: 569 - protein, 10 aa, synthetic construct
  REGION 1..10: note = source = /note="Description of Artificial Sequence: Synthetic peptide"
QHYESSPSWT

SEQ ID NO: 570 - protein, 10 aa, synthetic construct
  REGION 1..10: note = source = /note="Description of Artificial Sequence: Synthetic peptide"
QQYGSPPRFT

SEQ ID NO: 571 - protein, 10 aa, synthetic construct
  REGION 1..10: note = source = /note="Description of Artificial Sequence: Synthetic peptide"
QHYGSSPSWT

SEQ ID NO: 572 - protein, 10 aa, synthetic construct
  REGION 1..10: note = source = /note="Description of Artificial Sequence: Synthetic peptide"
QHYDSSPSWT

SEQ ID NO: 573 - protein, 10 aa, synthetic construct
  REGION 1..10: note = source = /note="Description of Artificial Sequence: Synthetic peptide"
QYYGTSPMYT

SEQ ID NO: 574 - protein, 9 aa, synthetic construct
  REGION 1..9: note = source = /note="Description of Artificial Sequence: Synthetic peptide"
MQALQTPLT

SEQ ID NO: 575 - protein, 11 aa, synthetic construct
  REGION 1..11: note = source = /note="Description of Artificial Sequence: Synthetic peptide"
QHYGNSPPKFT

SEQ ID NO: 576 - protein, 10 aa, synthetic construct
  REGION 1..10: note = source = /note="Description of Artificial Sequence: Synthetic peptide"
QHYGGSPRLT

SEQ ID NO: 577 - protein, 9 aa, synthetic construct
  REGION 1..9: note = source = /note="Description of Artificial Sequence: Synthetic peptide"
QQHYSTPWT

SEQ ID NO: 578 - protein, 9 aa, synthetic construct
  REGION 1..9: note = source = /note="Description of Artificial Sequence: Synthetic peptide"
LQSRIFPRT

SEQ ID NO: 579 - protein, 9 aa, synthetic construct
  REGION 1..9: note = source = /note="Description of Artificial Sequence: Synthetic peptide"
LQSRTIPRT

SEQ ID NO: 580 - protein, 239 aa, synthetic construct
  REGION 1..239: note = source = /note="Description of Artificial Sequence: Synthetic polypeptide"
EVQLVESGGGLVQPGGSLRLSCAVSGFALSNHGMSWVRRAPGKGLEWVSGIVYSGSTYYAASVKGRFTISRDNSRNTLYLQMNSLRPEDTAIYYCSAHGGESDVWGQGTTVTVSSASGGGGSGGRASGGGGSDIQLTQSPSSLSASVGDRVTITCRASQSISSYLNWYQQKPGKAPKLLIYAASSLQSGVPSRFSGSGSGTDFTLTISSLQPEDFATYYCQQSYSTPYTFGQGTKVEIK

SEQ ID NO: 581 - DNA, 717 bp, synthetic construct
  misc_feature 1..717: note = source = /note="Description of Artificial Sequence: Synthetic polynucleotide"
  source 1..717: mol_type = other DNA
gaagtgcaattggtggaatcagggggaggacttgtgcagcctggaggatcgctgagactgtcatgtgccgtgtccggctttgccctgtccaaccacgggatgtcctgggtccgccgcgcgcctggaaagggcctcgaatgggtgtcgggtattgtgtacagcggtagcacctactatgccgcatccgtgaaggggagattcaccatcagccgggacaactccaggaacactctgtacctccaaatgaattcgctgaggccagaggacactgccatctactactgctccgcgcatggcggagagtccgacgtctggggacaggggaccaccgtgaccgtgtctagcgcgtccggcggaggcggcagcgggggtcgggcatcagggggcggcggatcggacatccagctcacccagtccccgagctcgctgtccgcctccgtgggagatcgggtcaccatcacgtgccgcgccagccagtcgatttcctcctacctgaactggtaccaacagaagcccggaaaagccccgaagcttctcatctacgccgcctcgagcctgcagtcaggagtgccctcacggttctccggctccggttccggtactgatttcaccctgaccatttcctccctgcaaccggaggacttcgctacttactactgccagcagtcgtactccaccccctacactttcggacaaggcaccaaggtcgaaatcaag

SEQ ID NO: 582 - protein, 115 aa, synthetic construct
  REGION 1..115: note = source = /note="Description of Artificial Sequence: Synthetic polypeptide"
EVQLVESGGGLVQPGGSLRLSCAVSGFALSNHGMSWVRRAPGKGLEWVSGIVYSGSTYYAASVKGRFTISRDNSRNTLYLQMNSLRPEDTAIYYCSAHGGESDVWGQGTTVTVSS

SEQ ID NO: 583 - protein, 107 aa, synthetic construct
  REGION 1..107: note = source = /note="Description of Artificial Sequence: Synthetic polypeptide"
DIQLTQSPSSLSASVGDRVTITCRASQSISSYLNWYQQKPGKAPKLLIYAASSLQSGVPSRFSGSGSGTDFTLTISSLQPEDFATYYCQQSYSTPYTFGQGTKVEIK

SEQ ID NO: 584 - protein, 483 aa, synthetic construct
  REGION 1..483: note = source = /note="Description of Artificial Sequence: Synthetic polypeptide"
MALPVTALLLPLALLLHAARPEVQLVESGGGLVQPGGSLRLSCAVSGFALSNHGMSWVRRAPGKGLEWVSGIVYSGSTYYAASVKGRFTISRDNSRNTLYLQMNSLRPEDTAIYYCSAHGGESDVWGQGTTVTVSSASGGGGSGGRASGGGGSDIQLTQSPSSLSASVGDRVTITCRASQSISSYLNWYQQKPGKAPKLLIYAASSLQSGVPSRFSGSGSGTDFTLTISSLQPEDFATYYCQQSYSTPYTFGQGTKVEIKTTTPAPRPPTPAPTIASQPLSLRPEACRPAAGGAVHTRGLDFACDIYIWAPLAGTCGVLLLSLVITLYCKRGRKKLLYIFKQPFMRPVQTTQEEDGCSCRFPEEEEGGCELRVKFSRSADAPAYKQGQNQLYNELNLGRREEYDVLDKRRGRDPEMGGKPRRKNPQEGLYNELQKDKMAEAYSEIGMKGERRRGKGHDGLYQGLSTATKDTYDALHMQALPPR

SEQ ID NO: 585 - DNA, 1449 bp, synthetic construct
  misc_feature 1..1449: note = source = /note="Description of Artificial Sequence: Synthetic polynucleotide"
  source 1..1449: mol_type = other DNA
atggccctccctgtcaccgccctgctgcttccgctggctcttctgctccacgccgctcggcccgaagtgcaattggtggaatcagggggaggacttgtgcagcctggaggatcgctgagactgtcatgtgccgtgtccggctttgccctgtccaaccacgggatgtcctgggtccgccgcgcgcctggaaagggcctcgaatgggtgtcgggtattgtgtacagcggtagcacctactatgccgcatccgtgaaggggagattcaccatcagccgggacaactccaggaacactctgtacctccaaatgaattcgctgaggccagaggacactgccatctactactgctccgcgcatggcggagagtccgacgtctggggacaggggaccaccgtgaccgtgtctagcgcgtccggcggaggcggcagcgggggtcgggcatcagggggcggcggatcggacatccagctcacccagtccccgagctcgctgtccgcctccgtgggagatcgggtcaccatcacgtgccgcgccagccagtcgatttcctcctacctgaactggtaccaacagaagcccggaaaagccccgaagcttctcatctacgccgcctcgagcctgcagtcaggagtgccctcacggttctccggctccggttccggtactgatttcaccctgaccatttcctccctgcaaccggaggacttcgctacttactactgccagcagtcgtactccaccccctacactttcggacaaggcaccaaggtcgaaatcaagaccactaccccagcaccgaggccacccaccccggctcctaccatcgcctcccagcctctgtccctgcgtccggaggcatgtagacccgcagctggtggggccgtgcatacccggggtcttgacttcgcctgcgatatctacatttgggcccctctggctggtacttgcggggtcctgctgctttcactcgtgatcactctttactgtaagcgcggtcggaagaagctgctgtacatctttaagcaacccttcatgaggcctgtgcagactactcaagaggaggacggctgttcatgccggttcccagaggaggaggaaggcggctgcgaactgcgcgtgaaattcagccgcagcgcagatgctccagcctacaagcaggggcagaaccagctctacaacgaactcaatcttggtcggagagaggagtacgacgtgctggacaagcggagaggacgggacccagaaatgggcgggaagccgcgcagaaagaatccccaagagggcctgtacaacgagctccaaaaggataagatggcagaagcctatagcgagattggtatgaaaggggaacgcagaagaggcaaaggccacgacggactgtaccagggactcagcaccgccaccaaggacacctatgacgctcttcacatgcaggccctgccgcctcgg

SEQ ID NO: 586 - protein, 246 aa, synthetic construct
  REGION 1..246: note = source = /note="Description of Artificial Sequence: Synthetic polypeptide"
QVQLVESGGGLVQPGRSLRLSCAASGFTFSNYAMSWVRQAPGKGLGWVSGISRSGENTYYADSVKGRFTISRDNSKNTLYLQMNSLRDEDTAVYYCARSPAHYYGGMDVWGQGTTVTVSSASGGGGSGGRASGGGGSDIVLTQSPGTLSLSPGERATLSCRASQSISSSFLAWYQQKPGQAPRLLIYGASRRATGIPDRFSGSGSGTDFTLTISRLEPEDSAVYYCQQYHSSPSWTFGQGTKLEIK

SEQ ID NO: 587 - DNA, 738 bp, synthetic construct
  misc_feature 1..738: note = source = /note="Description of Artificial Sequence: Synthetic polynucleotide"
  source 1..738: mol_type = other DNA
caagtgcaactcgtggaatctggtggaggactcgtgcaacccggaagatcgcttagactgtcgtgtgccgccagcgggttcactttctcgaactacgcgatgtcctgggtccgccaggcacccggaaagggactcggttgggtgtccggcatttcccggtccggcgaaaatacctactacgccgactccgtgaagggccgcttcaccatctcaagggacaacagcaaaaacaccctgtacttgcaaatgaactccctgcgggatgaagatacagccgtgtactattgcgcccggtcgcctgcccattactacggcggaatggacgtctggggacagggaaccactgtgactgtcagcagcgcgtcgggtggcggcggctcagggggtcgggcctccggggggggagggtccgacatcgtgctgacccagtccccgggaaccctgagcctgagcccgggagagcgcgcgaccctgtcatgccgggcatcccagagcattagctcctcctttctcgcctggtatcagcagaagcccggacaggccccgaggctgctgatctacggcgctagcagaagggctaccggaatcccagaccggttctccggctccggttccgggaccgatttcacccttactatctcgcgcctggaacctgaggactccgccgtctactactgccagcagtaccactcatccccgtcgtggacgttcggacagggcaccaagctggagattaag

SEQ ID NO: 588 - protein, 120 aa, synthetic construct
  REGION 1..120: note = source = /note="Description of Artificial Sequence: Synthetic polypeptide"
QVQLVESGGGLVQPGRSLRLSCAASGFTFSNYAMSWVRQAPGKGLGWVSGISRSGENTYYADSVKGRFTISRDNSKNTLYLQMNSLRDEDTAVYYCARSPAHYYGGMDVWGQGTTVTVSS

SEQ ID NO: 589 - protein, 109 aa, synthetic construct
  REGION 1..109: note = source = /note="Description of Artificial Sequence: Synthetic polypeptide"
DIVLTQSPGTLSLSPGERATLSCRASQSISSSFLAWYQQKPGQAPRLLIYGASRRATGIPDRFSGSGSGTDFTLTISRLEPEDSAVYYCQQYHSSPSWTFGQGTKLEIK

SEQ ID NO: 590 - protein, 490 aa, synthetic construct
  REGION 1..490: note = source = /note="Description of Artificial Sequence: Synthetic polypeptide"
MALPVTALLLPLALLLHAARPQVQLVESGGGLVQPGRSLRLSCAASGFTFSNYAMSWVRQAPGKGLGWVSGISRSGENTYYADSVKGRFTISRDNSKNTLYLQMNSLRDEDTAVYYCARSPAHYYGGMDVWGQGTTVTVSSASGGGGSGGRASGGGGSDIVLTQSPGTLSLSPGERATLSCRASQSISSSFLAWYQQKPGQAPRLLIYGASRRATGIPDRFSGSGSGTDFTLTISRLEPEDSAVYYCQQYHSSPSWTFGQGTKLEIKTTTPAPRPPTPAPTIASQPLSLRPEACRPAAGGAVHTRGLDFACDIYIWAPLAGTCGVLLLSLVITLYCKRGRKKLLYIFKQPFMRPVQTTQEEDGCSCRFPEEEEGGCELRVKFSRSADAPAYKQGQNQLYNELNLGRREEYDVLDKRRGRDPEMGGKPRRKNPQEGLYNELQKDKMAEAYSEIGMKGERRRGKGHDGLYQGLSTATKDTYDALHMQALPPR

SEQ ID NO: 591 - DNA, 1470 bp, synthetic construct
  misc_feature 1..1470: note = source = /note="Description of Artificial Sequence: Synthetic polynucleotide"
  source 1..1470: mol_type = other DNA
atggccctccctgtcaccgccctgctgcttccgctggctcttctgctccacgccgctcggccccaagtgcaactcgtggaatctggtggaggactcgtgcaacccggaagatcgcttagactgtcgtgtgccgccagcgggttcactttctcgaactacgcgatgtcctgggtccgccaggcacccggaaagggactcggttgggtgtccggcatttcccggtccggcgaaaatacctactacgccgactccgtgaagggccgcttcaccatctcaagggacaacagcaaaaacaccctgtacttgcaaatgaactccctgcgggatgaagatacagccgtgtactattgcgcccggtcgcctgcccattactacggcggaatggacgtctggggacagggaaccactgtgactgtcagcagcgcgtcgggtggcggcggctcagggggtcgggcctccggggggggagggtccgacatcgtgctgacccagtccccgggaaccctgagcctgagcccgggagagcgcgcgaccctgtcatgccgggcatcccagagcattagctcctcctttctcgcctggtatcagcagaagcccggacaggccccgaggctgctgatctacggcgctagcagaagggctaccggaatcccagaccggttctccggctccggttccgggaccgatttcacccttactatctcgcgcctggaacctgaggactccgccgtctactactgccagcagtaccactcatccccgtcgtggacgttcggacagggcaccaagctggagattaagaccactaccccagcaccgaggccacccaccccggctcctaccatcgcctcccagcctctgtccctgcgtccggaggcatgtagacccgcagctggtggggccgtgcatacccggggtcttgacttcgcctgcgatatctacatttgggcccctctggctggtacttgcggggtcctgctgctttcactcgtgatcactctttactgtaagcgcggtcggaagaagctgctgtacatctttaagcaacccttcatgaggcctgtgcagactactcaagaggaggacggctgttcatgccggttcccagaggaggaggaaggcggctgcgaactgcgcgtgaaattcagccgcagcgcagatgctccagcctacaagcaggggcagaaccagctctacaacgaactcaatcttggtcggagagaggagtacgacgtgctggacaagcggagaggacgggacccagaaatgggcgggaagccgcgcagaaagaatccccaagagggcctgtacaacgagctccaaaaggataagatggcagaagcctatagcgagattggtatgaaaggggaacgcagaagaggcaaaggccacgacggactgtaccagggactcagcaccgccaccaaggacacctatgacgctcttcacatgcaggccctgccgcctcgg

SEQ ID NO: 592 - protein, 244 aa, synthetic construct
  REGION 1..244: note = source = /note="Description of Artificial Sequence: Synthetic polypeptide"
QVQLVESGGGLVQPGRSLRLSCAASGFTFDDYAMHWVRQAPGKGLEWVSGISWNSGSIGYADSVKGRFTISRDNAKNSLYLQMNSLRAEDTALYYCSVHSFLAYWGQGTLVTVSSASGGGGSGGRASGGGGSDIVMTQTPLSLPVTPGEPASISCRSSQSLLHSNGYNYLDWYLQKPGQSPQLLIYLGSNRASGVPDRFSGSGSGTDFTLKISRVEAEDVGVYYCMQALQTPYTFGQGTKVEIK

SEQ ID NO: 593 - DNA, 732 bp, synthetic construct
  misc_feature 1..732: note = source = /note="Description of Artificial Sequence: Synthetic polynucleotide"
  source 1..732: mol_type = other DNA
caagtgcaactcgtcgaatccggtggaggtctggtccaacctggtagaagcctgagactgtcgtgtgcggccagcggattcacctttgatgactatgctatgcactgggtgcggcaggccccaggaaagggcctggaatgggtgtcgggaattagctggaactccgggtccattggctacgccgactccgtgaagggccgcttcaccatctcccgcgacaacgcaaagaactccctgtacttgcaaatgaactcgctcagggctgaggataccgcgctgtactactgctccgtgcattccttcctggcctactggggacagggaactctggtcaccgtgtcgagcgcctccggcggcgggggctcgggtggacgggcctcgggcggaggggggtccgacatcgtgatgacccagaccccgctgagcttgcccgtgactcccggagagcctgcatccatctcctgccggtcatcccagtcccttctccactccaacggatacaactacctcgactggtacctccagaagccgggacagagccctcagcttctgatctacctggggtcaaatagagcctcaggagtgccggatcggttcagcggatctggttcgggaactgatttcactctgaagatttcccgcgtggaagccgaggacgtgggcgtctactactgtatgcaggcgctgcagaccccctataccttcggccaagggacgaaagtggagatcaag

SEQ ID NO: 594 - protein, 115 aa, synthetic construct
  REGION 1..115: note = source = /note="Description of Artificial Sequence: Synthetic polypeptide"
QVQLVESGGGLVQPGRSLRLSCAASGFTFDDYAMHWVRQAPGKGLEWVSGISWNSGSIGYADSVKGRFTISRDNAKNSLYLQMNSLRAEDTALYYCSVHSFLAYWGQGTLVTVSS

SEQ ID NO: 595 - protein, 112 aa, synthetic construct
  REGION 1..112: note = source = /note="Description of Artificial Sequence: Synthetic polypeptide"
DIVMTQTPLSLPVTPGEPASISCRSSQSLLHSNGYNYLDWYLQKPGQSPQLLIYLGSNRASGVPDRFSGSGSGTDFTLKISRVEAEDVGVYYCMQALQTPYTFGQGTKVEIK

SEQ ID NO: 596 - protein, 488 aa, synthetic construct
  REGION 1..488: note = source = /note="Description of Artificial Sequence: Synthetic polypeptide"
MALPVTALLLPLALLLHAARPQVQLVESGGGLVQPGRSLRLSCAASGFTFDDYAMHWVRQAPGKGLEWVSGISWNSGSIGYADSVKGRFTISRDNAKNSLYLQMNSLRAEDTALYYCSVHSFLAYWGQGTLVTVSSASGGGGSGGRASGGGGSDIVMTQTPLSLPVTPGEPASISCRSSQSLLHSNGYNYLDWYLQKPGQSPQLLIYLGSNRASGVPDRFSGSGSGTDFTLKISRVEAEDVGVYYCMQALQTPYTFGQGTKVEIKTTTPAPRPPTPAPTIASQPLSLRPEACRPAAGGAVHTRGLDFACDIYIWAPLAGTCGVLLLSLVITLYCKRGRKKLLYIFKQPFMRPVQTTQEEDGCSCRFPEEEEGGCELRVKFSRSADAPAYKQGQNQLYNELNLGRREEYDVLDKRRGRDPEMGGKPRRKNPQEGLYNELQKDKMAEAYSEIGMKGERRRGKGHDGLYQGLSTATKDTYDALHMQALPPR

SEQ ID NO: 597 - DNA, 1464 bp, synthetic construct
  misc_feature 1..1464: note = source = /note="Description of Artificial Sequence: Synthetic polynucleotide"
  source 1..1464: mol_type = other DNA
atggccctccctgtcaccgccctgctgcttccgctggctcttctgctccacgccgctcggccccaagtgcaactcgtcgaatccggtggaggtctggtccaacctggtagaagcctgagactgtcgtgtgcggccagcggattcacctttgatgactatgctatgcactgggtgcggcaggccccaggaaagggcctggaatgggtgtcgggaattagctggaactccgggtccattggctacgccgactccgtgaagggccgcttcaccatctcccgcgacaacgcaaagaactccctgtacttgcaaatgaactcgctcagggctgaggataccgcgctgtactactgctccgtgcattccttcctggcctactggggacagggaactctggtcaccgtgtcgagcgcctccggcggcgggggctcgggtggacgggcctcgggcggaggggggtccgacatcgtgatgacccagaccccgctgagcttgcccgtgactcccggagagcctgcatccatctcctgccggtcatcccagtcccttctccactccaacggatacaactacctcgactggtacctccagaagccgggacagagccctcagcttctgatctacctggggtcaaatagagcctcaggagtgccggatcggttcagcggatctggttcgggaactgatttcactctgaagatttcccgcgtggaagccgaggacgtgggcgtctactactgtatgcaggcgctgcagaccccctataccttcggccaagggacgaaagtggagatcaagaccactaccccagcaccgaggccacccaccccggctcctaccatcgcctcccagcctctgtccctgcgtccggaggcatgtagacccgcagctggtggggccgtgcatacccggggtcttgacttcgcctgcgatatctacatttgggcccctctggctggtacttgcggggtcctgctgctttcactcgtgatcactctttactgtaagcgcggtcggaagaagctgctgtacatctttaagcaacccttcatgaggcctgtgcagactactcaagaggaggacggctgttcatgccggttcccagaggaggaggaaggcggctgcgaactgcgcgtgaaattcagccgcagcgcagatgctccagcctacaagcaggggcagaaccagctctacaacgaactcaatcttggtcggagagaggagtacgacgtgctggacaagcggagaggacgggacccagaaatgggcgggaagccgcgcagaaagaatccccaagagggcctgtacaacgagctccaaaaggataagatggcagaagcctatagcgagattggtatgaaaggggaacgcagaagaggcaaaggccacgacggactgtaccagggactcagcaccgccaccaaggacacctatgacgctcttcacatgcaggccctgccgcctcgg

SEQ ID NO: 598 - protein, 243 aa, synthetic construct
  REGION 1..243: note = source = /note="Description of Artificial Sequence: Synthetic polypeptide"
EVQLLESGGGLVQPGGSLRLSCAVSGFALSNHGMSWVRRAPGKGLEWVSGIVYSGSTYYAASVKGRFTISRDNSRNTLYLQMNSLRPEDTAIYYCSAHGGESDVWGQGTTVTVSSASGGGGSGGRASGGGGSDIVMTQTPLSLSVTPGQPASISCKSSQSLLRNDGKTPLYWYLQKAGQPPQLLIYEVSNRFSGVPDRFSGSGSGTDFTLKISRVEAEDVGAYYCMQNIQFPSFGGGTKLEIK

SEQ ID NO: 599 - DNA, 729 bp, synthetic construct
  misc_feature 1..729: note = source = /note="Description of Artificial Sequence: Synthetic polynucleotide"
  source 1..729: mol_type = other DNA
gaagtgcaattgttggaatctggaggaggacttgtgcagcctggaggatcactgagactttcgtgtgcggtgtcaggcttcgccctgagcaaccacggcatgagctgggtgcggagagccccggggaagggtctggaatgggtgtccgggatcgtctactccggttcaacttactacgccgcaagcgtgaagggtcgcttcaccatttcccgcgataactcccggaacaccctgtacctccaaatgaactccctgcggcccgaggacaccgccatctactactgttccgcgcatggaggagagtccgatgtctggggacagggcactaccgtgaccgtgtcgagcgcctcggggggaggaggctccggcggtcgcgcctccggggggggtggcagcgacattgtgatgacgcagactccactctcgctgtccgtgaccccgggacagcccgcgtccatctcgtgcaagagctcccagagcctgctgaggaacgacggaaagactcctctgtattggtacctccagaaggctggacagcccccgcaactgctcatctacgaagtgtcaaatcgcttctccggggtgccggatcggttttccggctcgggatcgggcaccgacttcaccctgaaaatctccagggtcgaggccgaggacgtgggagcctactactgcatgcaaaacatccagttcccttccttcggcggcggcacaaagctggagattaag

SEQ ID NO: 600 - protein, 115 aa, synthetic construct
  REGION 1..115: note = source = /note="Description of Artificial Sequence: Synthetic polypeptide"
EVQLLESGGGLVQPGGSLRLSCAVSGFALSNHGMSWVRRAPGKGLEWVSGIVYSGSTYYAASVKGRFTISRDNSRNTLYLQMNSLRPEDTAIYYCSAHGGESDVWGQGTTVTVSS

SEQ ID NO: 601 - protein, 111 aa, synthetic construct
  REGION 1..111: note = source = /note="Description of Artificial Sequence: Synthetic polypeptide"
DIVMTQTPLSLSVTPGQPASISCKSSQSLLRNDGKTPLYWYLQKAGQPPQLLIYEVSNRFSGVPDRFSGSGSGTDFTLKISRVEAEDVGAYYCMQNIQFPSFGGGTKLEIK

SEQ ID NO: 602 - protein, 487 aa, synthetic construct
  REGION 1..487: note = source = /note="Description of Artificial Sequence: Synthetic polypeptide"
MALPVTALLLPLALLLHAARPEVQLLESGGGLVQPGGSLRLSCAVSGFALSNHGMSWVRRAPGKGLEWVSGIVYSGSTYYAASVKGRFTISRDNSRNTLYLQMNSLRPEDTAIYYCSAHGGESDVWGQGTTVTVSSASGGGGSGGRASGGGGSDIVMTQTPLSLSVTPGQPASISCKSSQSLLRNDGKTPLYWYLQKAGQPPQLLIYEVSNRFSGVPDRFSGSGSGTDFTLKISRVEAEDVGAYYCMQNIQFPSFGGGTKLEIKTTTPAPRPPTPAPTIASQPLSLRPEACRPAAGGAVHTRGLDFACDIYIWAPLAGTCGVLLLSLVITLYCKRGRKKLLYIFKQPFMRPVQTTQEEDGCSCRFPEEEEGGCELRVKFSRSADAPAYKQGQNQLYNELNLGRREEYDVLDKRRGRDPEMGGKPRRKNPQEGLYNELQKDKMAEAYSEIGMKGERRRGKGHDGLYQGLSTATKDTYDALHMQALPPR

SEQ ID NO: 603 - DNA, 1461 bp, synthetic construct
  misc_feature 1..1461: note = source = /note="Description of Artificial Sequence: Synthetic polynucleotide"
  source 1..1461: mol_type = other DNA
atggccctccctgtcaccgccctgctgcttccgctggctcttctgctccacgccgctcggcccgaagtgcaattgttggaatctggaggaggacttgtgcagcctggaggatcactgagactttcgtgtgcggtgtcaggcttcgccctgagcaaccacggcatgagctgggtgcggagagccccggggaagggtctggaatgggtgtccgggatcgtctactccggttcaacttactacgccgcaagcgtgaagggtcgcttcaccatttcccgcgataactcccggaacaccctgtacctccaaatgaactccctgcggcccgaggacaccgccatctactactgttccgcgcatggaggagagtccgatgtctggggacagggcactaccgtgaccgtgtcgagcgcctcggggggaggaggctccggcggtcgcgcctccggggggggtggcagcgacattgtgatgacgcagactccactctcgctgtccgtgaccccgggacagcccgcgtccatctcgtgcaagagctcccagagcctgctgaggaacgacggaaagactcctctgtattggtacctccagaaggctggacagcccccgcaactgctcatctacgaagtgtcaaatcgcttctccggggtgccggatcggttttccggctcgggatcgggcaccgacttcaccctgaaaatctccagggtcgaggccgaggacgtgggagcctactactgcatgcaaaacatccagttcccttccttcggcggcggcacaaagctggagattaagaccactaccccagcaccgaggccacccaccccggctcctaccatcgcctcccagcctctgtccctgcgtccggaggcatgtagacccgcagctggtggggccgtgcatacccggggtcttgacttcgcctgcgatatctacatttgggcccctctggctggtacttgcggggtcctgctgctttcactcgtgatcactctttactgtaagcgcggtcggaagaagctgctgtacatctttaagcaacccttcatgaggcctgtgcagactactcaagaggaggacggctgttcatgccggttcccagaggaggaggaaggcggctgcgaactgcgcgtgaaattcagccgcagcgcagatgctccagcctacaagcaggggcagaaccagctctacaacgaactcaatcttggtcggagagaggagtacgacgtgctggacaagcggagaggacgggacccagaaatgggcgggaagccgcgcagaaagaatccccaagagggcctgtacaacgagctccaaaaggataagatggcagaagcctatagcgagattggtatgaaaggggaacgcagaagaggcaaaggccacgacggactgtaccagggactcagcaccgccaccaaggacacctatgacgctcttcacatgcaggccctgccgcctcgg

SEQ ID NO: 604 - protein, 249 aa, synthetic construct
  REGION 1..249: note = source = /note="Description of Artificial Sequence: Synthetic polypeptide"
QVQLVQSGAEVRKTGASVKVSCKASGYIFDNFGINWVRQAPGQGLEWMGWINPKNNNTNYAQKFQGRVTITADESTNTAYMEVSSLRSEDTAVYYCARGPYYYQSYMDVWGQGTMVTVSSASGGGGSGGRASGGGGSDIVMTQTPLSLPVTPGEPASISCRSSQSLLHSNGYNYLNWYLQKPGQSPQLLIYLGSKRASGVPDRFSGSGSGTDFTLHITRVGAEDVGVYYCMQALQTPYTFGQGTKLEIK

SEQ ID NO: 605 - DNA, 747 bp, synthetic construct
  misc_feature 1..747: note = source = /note="Description of Artificial Sequence: Synthetic polynucleotide"
  source 1..747: mol_type = other DNA
caagtccaactcgtccagtccggcgcagaagtcagaaaaaccggtgctagcgtgaaagtgtcctgcaaggcctccggctacattttcgataacttcggaatcaactgggtcagacaggccccgggccaggggctggaatggatgggatggatcaaccccaagaacaacaacaccaactacgcacagaagttccagggccgcgtgactatcaccgccgatgaatcgaccaataccgcctacatggaggtgtcctccctgcggtcggaggacactgccgtgtattactgcgcgaggggcccatactactaccaaagctacatggacgtctggggacagggaaccatggtgaccgtgtcatccgcctccggtggtggaggctccggggggcgggcttcaggaggcggaggaagcgatattgtgatgacccagactccgcttagcctgcccgtgactcctggagaaccggcctccatttcctgccggtcctcgcaatcactcctgcattccaacggttacaactacctgaattggtacctccagaagcctggccagtcgccccagttgctgatctatctgggctcgaagcgcgcctccggggtgcctgaccggtttagcggatctgggagcggcacggacttcactctccacatcacccgcgtgggagcggaggacgtgggagtgtactactgtatgcaggcgctgcagactccgtacacattcggacagggcaccaagctggagatcaag

SEQ ID NO: 606 - protein, 120 aa, synthetic construct
  REGION 1..120: note = source = /note="Description of Artificial Sequence: Synthetic polypeptide"
QVQLVQSGAEVRKTGASVKVSCKASGYIFDNFGINWVRQAPGQGLEWMGWINPKNNNTNYAQKFQGRVTITADESTNTAYMEVSSLRSEDTAVYYCARGPYYYQSYMDVWGQGTMVTVSS

SEQ ID NO: 607 - protein, 112 aa, synthetic construct
  REGION 1..112: note = source = /note="Description of Artificial Sequence: Synthetic polypeptide"
DIVMTQTPLSLPVTPGEPASISCRSSQSLLHSNGYNYLNWYLQKPGQSPQLLIYLGSKRASGVPDRFSGSGSGTDFTLHITRVGAEDVGVYYCMQALQTPYTFGQGTKLEIK

SEQ ID NO: 608 - protein, 493 aa, synthetic construct
  REGION 1..493: note = source = /note="Description of Artificial Sequence: Synthetic polypeptide"
MALPVTALLLPLALLLHAARPQVQLVQSGAEVRKTGASVKVSCKASGYIFDNFGINWVRQAPGQGLEWMGWINPKNNNTNYAQKFQGRVTITADESTNTAYMEVSSLRSEDTAVYYCARGPYYYQSYMDVWGQGTMVTVSSASGGGGSGGRASGGGGSDIVMTQTPLSLPVTPGEPASISCRSSQSLLHSNGYNYLNWYLQKPGQSPQLLIYLGSKRASGVPDRFSGSGSGTDFTLHITRVGAEDVGVYYCMQALQTPYTFGQGTKLEIKTTTPAPRPPTPAPTIASQPLSLRPEACRPAAGGAVHTRGLDFACDIYIWAPLAGTCGVLLLSLVITLYCKRGRKKLLYIFKQPFMRPVQTTQEEDGCSCRFPEEEEGGCELRVKFSRSADAPAYKQGQNQLYNELNLGRREEYDVLDKRRGRDPEMGGKPRRKNPQEGLYNELQKDKMAEAYSEIGMKGERRRGKGHDGLYQGLSTATKDTYDALHMQALPPR

SEQ ID NO: 609 - DNA, 1479 bp, synthetic construct
  misc_feature 1..1479: note = source = /note="Description of Artificial Sequence: Synthetic polynucleotide"
  source 1..1479: mol_type = other DNA
atggccctccctgtcaccgccctgctgcttccgctggctcttctgctccacgccgctcggccccaagtccaactcgtccagtccggcgcagaagtcagaaaaaccggtgctagcgtgaaagtgtcctgcaaggcctccggctacattttcgataacttcggaatcaactgggtcagacaggccccgggccaggggctggaatggatgggatggatcaaccccaagaacaacaacaccaactacgcacagaagttccagggccgcgtgactatcaccgccgatgaatcgaccaataccgcctacatggaggtgtcctccctgcggtcggaggacactgccgtgtattactgcgcgaggggcccatactactaccaaagctacatggacgtctggggacagggaaccatggtgaccgtgtcatccgcctccggtggtggaggctccggggggcgggcttcaggaggcggaggaagcgatattgtgatgacccagactccgcttagcctgcccgtgactcctggagaaccggcctccatttcctgccggtcctcgcaatcactcctgcattccaacggttacaactacctgaattggtacctccagaagcctggccagtcgccccagttgctgatctatctgggctcgaagcgcgcctccggggtgcctgaccggtttagcggatctgggagcggcacggacttcactctccacatcacccgcgtgggagcggaggacgtgggagtgtactactgtatgcaggcgctgcagactccgtacacattcggacagggcaccaagctggagatcaagaccactaccccagcaccgaggccacccaccccggctcctaccatcgcctcccagcctctgtccctgcgtccggaggcatgtagacccgcagctggtggggccgtgcatacccggggtcttgacttcgcctgcgatatctacatttgggcccctctggctggtacttgcggggtcctgctgctttcactcgtgatcactctttactgtaagcgcggtcggaagaagctgctgtacatctttaagcaacccttcatgaggcctgtgcagactactcaagaggaggacggctgttcatgccggttcccagaggaggaggaaggcggctgcgaactgcgcgtgaaattcagccgcagcgcagatgctccagcctacaagcaggggcagaaccagctctacaacgaactcaatcttggtcggagagaggagtacgacgtgctggacaagcggagaggacgggacccagaaatgggcgggaagccgcgcagaaagaatccccaagagggcctgtacaacgagctccaaaaggataagatggcagaagcctatagcgagattggtatgaaaggggaacgcagaagaggcaaaggccacgacggactgtaccagggactcagcaccgccaccaaggacacctatgacgctcttcacatgcaggccctgccgcctcgg

SEQ ID NO: 610 - protein, 246 aa, synthetic construct
  REGION 1..246: note = source = /note="Description of Artificial Sequence: Synthetic polypeptide"
QVQLQESGGGLVQPGGSLRLSCAASGFTFSSDAMTWVRQAPGKGLEWVSVISGSGGTTYYADSVKGRFTISRDNSKNTLYLQMNSLRAEDTAVYYCAKLDSSGYYYARGPRYWGQGTLVTVSSASGGGGSGGRASGGGGSDIQLTQSPSSLSASVGDRVTITCRASQSISSYLNWYQQKPGKAPKLLIYGASTLASGVPARFSGSGSGTHFTLTINSLQSEDSATYYCQQSYKRASFGQGTKVEIK

SEQ ID NO: 611 - DNA, 738 bp, synthetic construct
  misc_feature 1..738: note = source = /note="Description of Artificial Sequence: Synthetic polynucleotide"
  source 1..738: mol_type = other DNA
caagtgcaacttcaagaatcaggcggaggactcgtgcagcccggaggatcattgcggctctcgtgcgccgcctcgggcttcaccttctcgagcgacgccatgacctgggtccgccaggccccggggaaggggctggaatgggtgtctgtgatttccggctccgggggaactacgtactacgccgattccgtgaaaggtcgcttcactatctcccgggacaacagcaagaacaccctttatctgcaaatgaattccctccgcgccgaggacaccgccgtgtactactgcgccaagctggactcctcgggctactactatgcccggggtccgagatactggggacagggaaccctcgtgaccgtgtcctccgcgtccggcggaggagggtcgggagggcgggcctccggcggcggcggttcggacatccagctgacccagtccccatcctcactgagcgcaagcgtgggcgacagagtcaccattacatgcagggcgtcccagagcatcagctcctacctgaactggtaccaacagaagcctggaaaggctcctaagctgttgatctacggggcttcgaccctggcatccggggtgcccgcgaggtttagcggaagcggtagcggcactcacttcactctgaccattaacagcctccagtccgaggattcagccacttactactgtcagcagtcctacaagcgggccagcttcggacagggcactaaggtcgagatcaag

SEQ ID NO: 612 - protein, 123 aa, synthetic construct
  REGION 1..123: note = source = /note="Description of Artificial Sequence: Synthetic polypeptide"
QVQLQESGGGLVQPGGSLRLSCAASGFTFSSDAMTWVRQAPGKGLEWVSVISGSGGTTYYADSVKGRFTISRDNSKNTLYLQMNSLRAEDTAVYYCAKLDSSGYYYARGPRYWGQGTLVTVSS

SEQ ID NO: 613 - protein, 106 aa, synthetic construct
  REGION 1..106: note = source = /note="Description of Artificial Sequence: Synthetic polypeptide"
DIQLTQSPSSLSASVGDRVTITCRASQSISSYLNWYQQKPGKAPKLLIYGASTLASGVPARFSGSGSGTHFTLTINSLQSEDSATYYCQQSYKRASFGQGTKVEIK

SEQ ID NO: 614 - protein, 490 aa, synthetic construct
  REGION 1..490: note = source = /note="Description of Artificial Sequence: Synthetic polypeptide"
MALPVTALLLPLALLLHAARPQVQLQESGGGLVQPGGSLRLSCAASGFTFSSDAMTWVRQAPGKGLEWVSVISGSGGTTYYADSVKGRFTISRDNSKNTLYLQMNSLRAEDTAVYYCAKLDSSGYYYARGPRYWGQGTLVTVSSASGGGGSGGRASGGGGSDIQLTQSPSSLSASVGDRVTITCRASQSISSYLNWYQQKPGKAPKLLIYGASTLASGVPARFSGSGSGTHFTLTINSLQSEDSATYYCQQSYKRASFGQGTKVEIKTTTPAPRPPTPAPTIASQPLSLRPEACRPAAGGAVHTRGLDFACDIYIWAPLAGTCGVLLLSLVITLYCKRGRKKLLYIFKQPFMRPVQTTQEEDGCSCRFPEEEEGGCELRVKFSRSADAPAYKQGQNQLYNELNLGRREEYDVLDKRRGRDPEMGGKPRRKNPQEGLYNELQKDKMAEAYSEIGMKGERRRGKGHDGLYQGLSTATKDTYDALHMQALPPR

SEQ ID NO: 615 - DNA, 1470 bp, synthetic construct
  misc_feature 1..1470: note = source = /note="Description of Artificial Sequence: Synthetic polynucleotide"
  source 1..1470: mol_type = other DNA
atggccctccctgtcaccgccctgctgcttccgctggctcttctgctccacgccgctcggccccaagtgcaacttcaagaatcaggcggaggactcgtgcagcccggaggatcattgcggctctcgtgcgccgcctcgggcttcaccttctcgagcgacgccatgacctgggtccgccaggccccggggaaggggctggaatgggtgtctgtgatttccggctccgggggaactacgtactacgccgattccgtgaaaggtcgcttcactatctcccgggacaacagcaagaacaccctttatctgcaaatgaattccctccgcgccgaggacaccgccgtgtactactgcgccaagctggactcctcgggctactactatgcccggggtccgagatactggggacagggaaccctcgtgaccgtgtcctccgcgtccggcggaggagggtcgggagggcgggcctccggcggcggcggttcggacatccagctgacccagtccccatcctcactgagcgcaagcgtgggcgacagagtcaccattacatgcagggcgtcccagagcatcagctcctacctgaactggtaccaacagaagcctggaaaggctcctaagctgttgatctacggggcttcgaccctggcatccggggtgcccgcgaggtttagcggaagcggtagcggcactcacttcactctgaccattaacagcctccagtccgaggattcagccacttactactgtcagcagtcctacaagcgggccagcttcggacagggcactaaggtcgagatcaagaccactaccccagcaccgaggccacccaccccggctcctaccatcgcctcccagcctctgtccctgcgtccggaggcatgtagacccgcagctggtggggccgtgcatacccggggtcttgacttcgcctgcgatatctacatttgggcccctctggctggtacttgcggggtcctgctgctttcactcgtgatcactctttactgtaagcgcggtcggaagaagctgctgtacatctttaagcaacccttcatgaggcctgtgcagactactcaagaggaggacggctgttcatgccggttcccagaggaggaggaaggcggctgcgaactgcgcgtgaaattcagccgcagcgcagatgctccagcctacaagcaggggcagaaccagctctacaacgaactcaatcttggtcggagagaggagtacgacgtgctggacaagcggagaggacgggacccagaaatgggcgggaagccgcgcagaaagaatccccaagagggcctgtacaacgagctccaaaaggataagatggcagaagcctatagcgagattggtatgaaaggggaacgcagaagaggcaaaggccacgacggactgtaccagggactcagcaccgccaccaaggacacctatgacgctcttcacatgcaggccctgccgcctcgg

SEQ ID NO: 616 - protein, 247 aa, synthetic construct
  REGION 1..247: note = source = /note="Description of Artificial Sequence: Synthetic polypeptide"
QVQLVQSGAEVKKPGASVKVSCKASGYTFSNYGITWVRQAPGQGLEWMGWISAYNGNTNYAQKFQGRVTMTRNTSISTAYMELSSLRSEDTAVYYCARGPYYYYMDVWGKGTMVTVSSASGGGGSGGRASGGGGSEIVMTQSPLSLPVTPGEPASISCRSSQSLLYSNGYNYVDWYLQKPGQSPQLLIYLGSNRASGVPDRFSGSGSGTDFKLQISRVEAEDVGIYYCMQGRQFPYSFGQGTKVEIK

SEQ ID NO: 617 - DNA, 741 bp, synthetic construct
  misc_feature 1..741: note = source = /note="Description of Artificial Sequence: Synthetic polynucleotide"
  source 1..741: mol_type = other DNA
caagtccaactggtccagagcggtgcagaagtgaagaagcccggagcgagcgtgaaagtgtcctgcaaggcttccgggtacaccttctccaactacggcatcacttgggtgcgccaggccccgggacagggcctggaatggatggggtggatttccgcgtacaacggcaatacgaactacgctcagaagttccagggtagagtgaccatgactaggaacacctccatttccaccgcctacatggaactgtcctccctgcggagcgaggacaccgccgtgtactattgcgcccggggaccatactactactacatggatgtctgggggaaggggactatggtcaccgtgtcatccgcctcgggaggcggcggatcaggaggacgcgcctctggtggtggaggatcggagatcgtgatgacccagagccctctctccttgcccgtgactcctggggagcccgcatccatttcatgccggagctcccagtcacttctctactccaacggctataactacgtggattggtacctccaaaagccgggccagagcccgcagctgctgatctacctgggctcgaacagggccagcggagtgcctgaccggttctccgggtcgggaagcgggaccgacttcaagctgcaaatctcgagagtggaggccgaggacgtgggaatctactactgtatgcagggccgccagtttccgtactcgttcggacagggcaccaaagtggaaatcaag

SEQ ID NO: 618 - protein, 118 aa, synthetic construct
  REGION 1..118: note = source = /note="Description of Artificial Sequence: Synthetic polypeptide"
QVQLVQSGAEVKKPGASVKVSCKASGYTFSNYGITWVRQAPGQGLEWMGWISAYNGNTNYAQKFQGRVTMTRNTSISTAYMELSSLRSEDTAVYYCARGPYYYYMDVWGKGTMVTVSS

SEQ ID NO: 619 - protein, 112 aa, synthetic construct
  REGION 1..112: note = source = /note="Description of Artificial Sequence: Synthetic polypeptide"
EIVMTQSPLSLPVTPGEPASISCRSSQSLLYSNGYNYVDWYLQKPGQSPQLLIYLGSNRASGVPDRFSGSGSGTDFKLQISRVEAEDVGIYYCMQGRQFPYSFGQGTKVEIK

SEQ ID NO: 620 - protein, 491 aa, synthetic construct
  REGION 1..491: note = source = /note="Description of Artificial Sequence: Synthetic polypeptide"
MALPVTALLLPLALLLHAARPQVQLVQSGAEVKKPGASVKVSCKASGYTFSNYGITWVRQAPGQGLEWMGWISAYNGNTNYAQKFQGRVTMTRNTSISTAYMELSSLRSEDTAVYYCARGPYYYYMDVWGKGTMVTVSSASGGGGSGGRASGGGGSEIVMTQSPLSLPVTPGEPASISCRSSQSLLYSNGYNYVDWYLQKPGQSPQLLIYLGSNRASGVPDRFSGSGSGTDFKLQISRVEAEDVGIYYCMQGRQFPYSFGQGTKVEIKTTTPAPRPPTPAPTIASQPLSLRPEACRPAAGGAVHTRGLDFACDIYIWAPLAGTCGVLLLSLVITLYCKRGRKKLLYIFKQPFMRPVQTTQEEDGCSCRFPEEEEGGCELRVKFSRSADAPAYKQGQNQLYNELNLGRREEYDVLDKRRGRDPEMGGKPRRKNPQEGLYNELQKDKMAEAYSEIGMKGERRRGKGHDGLYQGLSTATKDTYDALHMQALPPR

SEQ ID NO: 621 - DNA, 1473 bp, synthetic construct
  misc_feature 1..1473: note = source = /note="Description of Artificial Sequence: Synthetic polynucleotide"
  source 1..1473: mol_type = other DNA
atggccctccctgtcaccgccctgctgcttccgctggctcttctgctccacgccgctcggccccaagtccaactggtccagagcggtgcagaagtgaagaagcccggagcgagcgtgaaagtgtcctgcaaggcttccgggtacaccttctccaactacggcatcacttgggtgcgccaggccccgggacagggcctggaatggatggggtggatttccgcgtacaacggcaatacgaactacgctcagaagttccagggtagagtgaccatgactaggaacacctccatttccaccgcctacatggaactgtcctccctgcggagcgaggacaccgccgtgtactattgcgcccggggaccatactactactacatggatgtctgggggaaggggactatggtcaccgtgtcatccgcctcgggaggcggcggatcaggaggacgcgcctctggtggtggaggatcggagatcgtgatgacccagagccctctctccttgcccgtgactcctggggagcccgcatccatttcatgccggagctcccagtcacttctctactccaacggctataactacgtggattggtacctccaaaagccgggccagagcccgcagctgctgatctacctgggctcgaacagggccagcggagtgcctgaccggttctccgggtcgggaagcgggaccgacttcaagctgcaaatctcgagagtggaggccgaggacgtgggaatctactactgtatgcagggccgccagtttccgtactcgttcggacagggcaccaaagtggaaatcaagaccactaccccagcaccgaggccacccaccccggctcctaccatcgcctcccagcctctgtccctgcgtccggaggcatgtagacccgcagctggtggggccgtgcatacccggggtcttgacttcgcctgcgatatctacatttgggcccctctggctggtacttgcggggtcctgctgctttcactcgtgatcactctttactgtaagcgcggtcggaagaagctgctgtacatctttaagcaacccttcatgaggcctgtgcagactactcaagaggaggacggctgttcatgccggttcccagaggaggaggaaggcggctgcgaactgcgcgtgaaattcagccgcagcgcagatgctccagcctacaagcaggggcagaaccagctctacaacgaactcaatcttggtcggagagaggagtacgacgtgctggacaagcggagaggacgggacccagaaatgggcgggaagccgcgcagaaagaatccccaagagggcctgtacaacgagctccaaaaggataagatggcagaagcctatagcgagattggtatgaaaggggaacgcagaagaggcaaaggccacgacggactgtaccagggactcagcaccgccaccaaggacacctatgacgctcttcacatgcaggccctgccgcctcgg

SEQ ID NO: 622 - protein, 238 aa, synthetic construct
  REGION 1..238: note = source = /note="Description of Artificial Sequence: Synthetic polypeptide"
EVQLLETGGGLVQPGGSLRLSCAVSGFALSNHGMSWVRRAPGKGLEWVSGIVYSGSTYYAASVKGRFTISRDNSRNTLYLQMNSLRPEDTAIYYCSAHGGESDVWGQGTTVTVSSASGGGGSGGRASGGGGSEIVLTQSPATLSVSPGESATLSCRASQSVSSNLAWYQQKPGQAPRLLIYGASTRASGIPDRFSGSGSGTDFTLTISSLQAEDVAVYYCQQYGSSLTFGGGTKVEIK

SEQ ID NO: 623 - DNA, 714 bp, synthetic construct
  misc_feature 1..714: note = source = /note="Description of Artificial Sequence: Synthetic polynucleotide"
  source 1..714: mol_type = other DNA
gaagtgcaattgctcgaaactggaggaggtctggtgcaacctggaggatcacttcgcctgtcctgcgccgtgtcgggctttgccctgtccaaccatggaatgagctgggtccgccgcgcgccggggaagggcctcgaatgggtgtccggcatcgtctactccggctccacctactacgccgcgtccgtgaagggccggttcacgatttcacgggacaactcgcggaacaccctgtacctccaaatgaattcccttcggccggaggatactgccatctactactgctccgcccacggtggcgaatccgacgtctggggccagggaaccaccgtgaccgtgtccagcgcgtccgggggaggaggaagcgggggtagagcatcgggtggaggcggatcagagatcgtgctgacccagtcccccgccaccttgagcgtgtcaccaggagagtccgccaccctgtcatgccgcgccagccagtccgtgtcctccaacctggcttggtaccagcagaagccggggcaggcccctagactcctgatctatggggcgtcgacccgggcatctggaattcccgataggttcagcggatcgggctcgggcactgacttcactctgaccatctcctcgctgcaagccgaggacgtggctgtgtactactgtcagcagtacggaagctccctgactttcggtggcgggaccaaagtcgagattaag

SEQ ID NO: 624 - protein, 115 aa, synthetic construct
  REGION 1..115: note = source = /note="Description of Artificial Sequence: Synthetic polypeptide"
EVQLLETGGGLVQPGGSLRLSCAVSGFALSNHGMSWVRRAPGKGLEWVSGIVYSGSTYYAASVKGRFTISRDNSRNTLYLQMNSLRPEDTAIYYCSAHGGESDVWGQGTTVTVSS

SEQ ID NO: 625 - protein, 106 aa, synthetic construct
  REGION 1..106: note = source = /note="Description of Artificial Sequence: Synthetic polypeptide"
EIVLTQSPATLSVSPGESATLSCRASQSVSSNLAWYQQKPGQAPRLLIYGASTRASGIPDRFSGSGSGTDFTLTISSLQAEDVAVYYCQQYGSSLTFGGGTKVEIK

SEQ ID NO: 626 - protein, 482 aa, synthetic construct
  REGION 1..482: note = source = /note="Description of Artificial Sequence: Synthetic polypeptide"
MALPVTALLLPLALLLHAARPEVQLLETGGGLVQPGGSLRLSCAVSGFALSNHGMSWVRRAPGKGLEWVSGIVYSGSTYYAASVKGRFTISRDNSRNTLYLQMNSLRPEDTAIYYCSAHGGESDVWGQGTTVTVSSASGGGGSGGRASGGGGSEIVLTQSPATLSVSPGESATLSCRASQSVSSNLAWYQQKPGQAPRLLIYGASTRASGIPDRFSGSGSGTDFTLTISSLQAEDVAVYYCQQYGSSLTFGGGTKVEIKTTTPAPRPPTPAPTIASQPLSLRPEACRPAAGGAVHTRGLDFACDIYIWAPLAGTCGVLLLSLVITLYCKRGRKKLLYIFKQPFMRPVQTTQEEDGCSCRFPEEEEGGCELRVKFSRSADAPAYKQGQNQLYNELNLGRREEYDVLDKRRGRDPEMGGKPRRKNPQEGLYNELQKDKMAEAYSEIGMKGERRRGKGHDGLYQGLSTATKDTYDALHMQALPPR

SEQ ID NO: 627 - DNA, 1446 bp, synthetic construct
  misc_feature 1..1446: note = source = /note="Description of Artificial Sequence: Synthetic polynucleotide"
  source 1..1446: mol_type = other DNA
atggccctccctgtcaccgccctgctgcttccgctggctcttctgctccacgccgctcggcccgaagtgcaattgctcgaaactggaggaggtctggtgcaacctggaggatcacttcgcctgtcctgcgccgtgtcgggctttgccctgtccaaccatggaatgagctgggtccgccgcgcgccggggaagggcctcgaatgggtgtccggcatcgtctactccggctccacctactacgccgcgtccgtgaagggccggttcacgatttcacgggacaactcgcggaacaccctgtacctccaaatgaattcccttcggccggaggatactgccatctactactgctccgcccacggtggcgaatccgacgtctggggccagggaaccaccgtgaccgtgtccagcgcgtccgggggaggaggaagcgggggtagagcatcgggtggaggcggatcagagatcgtgctgacccagtcccccgccaccttgagcgtgtcaccaggagagtccgccaccctgtcatgccgcgccagccagtccgtgtcctccaacctggcttggtaccagcagaagccggggcaggcccctagactcctgatctatggggcgtcgacccgggcatctggaattcccgataggttcagcggatcgggctcgggcactgacttcactctgaccatctcctcgctgcaagccgaggacgtggctgtgtactactgtcagcagtacggaagctccctgactttcggtggcgggaccaaagtcgagattaagaccactaccccagcaccgaggccacccaccccggctcctaccatcgcctcccagcctctgtccctgcgtccggaggcatgtagacccgcagctggtggggccgtgcatacccggggtcttgacttcgcctgcgatatctacatttgggcccctctggctggtacttgcggggtcctgctgctttcactcgtgatcactctttactgtaagcgcggtcggaagaagctgctgtacatctttaagcaacccttcatgaggcctgtgcagactactcaagaggaggacggctgttcatgccggttcccagaggaggaggaaggcggctgcgaactgcgcgtgaaattcagccgcagcgcagatgctccagcctacaagcaggggcagaaccagctctacaacgaactcaatcttggtcggagagaggagtacgacgtgctggacaagcggagaggacgggacccagaaatgggcgggaagccgcgcagaaagaatccccaagagggcctgtacaacgagctccaaaaggataagatggcagaagcctatagcgagattggtatgaaaggggaacgcagaagaggcaaaggccacgacggactgtaccagggactcagcaccgccaccaaggacacctatgacgctcttcacatgcaggccctgccgcctcgg

SEQ ID NO: 628 - protein, 239 aa, synthetic construct
  REGION 1..239: note = source = /note="Description of Artificial Sequence: Synthetic polypeptide"
EVQLVETGGGLVQPGGSLRLSCAVSGFALSNHGMSWVRRAPGKGLEWVSGIVYSGSTYYAASVKGRFTISRDNSRNTLYLQMNSLRPEDTAIYYCSAHGGESDVWGQGTTVTVSSASGGGGSGGRASGGGGSEIVMTQSPATLSVSPGERATLSCRASQSVSSKLAWYQQKPGQAPRLLMYGASIRATGIPDRFSGSGSGTEFTLTISSLEPEDFAVYYCQQYGSSSWTFGQGTKVEIK

SEQ ID NO: 629 - DNA, 717 bp, synthetic construct
  misc_feature 1..717: note = source = /note="Description of Artificial Sequence: Synthetic polynucleotide"
  source 1..717: mol_type = other DNA
gaagtgcaattggtggaaactggaggaggacttgtgcaacctggaggatcattgagactgagctgcgcagtgtcgggattcgccctgagcaaccatggaatgtcctgggtcagaagggcccctggaaaaggcctcgaatgggtgtcagggatcgtgtactccggttccacttactacgccgcctccgtgaaggggcgcttcactatctcacgggataactcccgcaataccctgtacctccaaatgaacagcctgcggccggaggataccgccatctactactgttccgcccacggtggagagtctgacgtctggggccagggaactaccgtgaccgtgtcctccgcgtccggcggtggagggagcggcggccgcgccagcggcggcggaggctccgagatcgtgatgacccagagccccgctactctgtcggtgtcgcccggagaaagggcgaccctgtcctgccgggcgtcgcagtccgtgagcagcaagctggcttggtaccagcagaagccgggccaggcaccacgcctgcttatgtacggtgcctccattcgggccaccggaatcccggaccggttctcggggtcggggtccggtaccgagttcacactgaccatttcctcgctcgagcccgaggactttgccgtctattactgccagcagtacggctcctcctcatggacgttcggccaggggaccaaggtcgaaatcaag

SEQ ID NO: 630 - protein, 115 aa, synthetic construct
  REGION 1..115: note = source = /note="Description of Artificial Sequence: Synthetic polypeptide"
EVQLVETGGGLVQPGGSLRLSCAVSGFALSNHGMSWVRRAPGKGLEWVSGIVYSGSTYYAASVKGRFTISRDNSRNTLYLQMNSLRPEDTAIYYCSAHGGESDVWGQGTTVTVSS

SEQ ID NO: 631 - protein, 107 aa, synthetic construct
  REGION 1..107: note = source = /note="Description of Artificial Sequence: Synthetic polypeptide"
EIVMTQSPATLSVSPGERATLSCRASQSVSSKLAWYQQKPGQAPRLLMYGASIRATGIPDRFSGSGSGTEFTLTISSLEPEDFAVYYCQQYGSSSWTFGQGTKVEIK

SEQ ID NO: 632 - protein, 483 aa, synthetic construct
  REGION 1..483: note = source = /note="Description of Artificial Sequence: Synthetic polypeptide"
MALPVTALLLPLALLLHAARPEVQLVETGGGLVQPGGSLRLSCAVSGFALSNHGMSWVRRAPGKGLEWVSGIVYSGSTYYAASVKGRFTISRDNSRNTLYLQMNSLRPEDTAIYYCSAHGGESDVWGQGTTVTVSSASGGGGSGGRASGGGGSEIVMTQSPATLSVSPGERATLSCRASQSVSSKLAWYQQKPGQAPRLLMYGASIRATGIPDRFSGSGSGTEFTLTISSLEPEDFAVYYCQQYGSSSWTFGQGTKVEIKTTTPAPRPPTPAPTIASQPLSLRPEACRPAAGGAVHTRGLDFACDIYIWAPLAGTCGVLLLSLVITLYCKRGRKKLLYIFKQPFMRPVQTTQEEDGCSCRFPEEEEGGCELRVKFSRSADAPAYKQGQNQLYNELNLGRREEYDVLDKRRGRDPEMGGKPRRKNPQEGLYNELQKDKMAEAYSEIGMKGERRRGKGHDGLYQGLSTATKDTYDALHMQALPPR

SEQ ID NO: 633 - DNA, 1449 bp, synthetic construct
  misc_feature 1..1449: note = source = /note="Description of Artificial Sequence: Synthetic polynucleotide"
  source 1..1449: mol_type = other DNA
atggccctccctgtcaccgccctgctgcttccgctggctcttctgctccacgccgctcggcccgaagtgcaattggtggaaactggaggaggacttgtgcaacctggaggatcattgagactgagctgcgcagtgtcgggattcgccctgagcaaccatggaatgtcctgggtcagaagggcccctggaaaaggcctcgaatgggtgtcagggatcgtgtactccggttccacttactacgccgcctccgtgaaggggcgcttcactatctcacgggataactcccgcaataccctgtacctccaaatgaacagcctgcggccggaggataccgccatctactactgttccgcccacggtggagagtctgacgtctggggccagggaactaccgtgaccgtgtcctccgcgtccggcggtggagggagcggcggccgcgccagcggcggcggaggctccgagatcgtgatgacccagagccccgctactctgtcggtgtcgcccggagaaagggcgaccctgtcctgccgggcgtcgcagtccgtgagcagcaagctggcttggtaccagcagaagccgggccaggcaccacgcctgcttatgtacggtgcctccattcgggccaccggaatcccggaccggttctcggggtcggggtccggtaccgagttcacactgaccatttcctcgctcgagcccgaggactttgccgtctattactgccagcagtacggctcctcctcatggacgttcggccaggggaccaaggtcgaaatcaagaccactaccccagcaccgaggccacccaccccggctcctaccatcgcctcccagcctctgtccctgcgtccggaggcatgtagacccgcagctggtggggccgtgcatacccggggtcttgacttcgcctgcgatatctacatttgggcccctctggctggtacttgcggggtcctgctgctttcactcgtgatcactctttactgtaagcgcggtcggaagaagctgctgtacatctttaagcaacccttcatgaggcctgtgcagactactcaagaggaggacggctgttcatgccggttcccagaggaggaggaaggcggctgcgaactgcgcgtgaaattcagccgcagcgcagatgctccagcctacaagcaggggcagaaccagctctacaacgaactcaatcttggtcggagagaggagtacgacgtgctggacaagcggagaggacgggacccagaaatgggcgggaagccgcgcagaaagaatccccaagagggcctgtacaacgagctccaaaaggataagatggcagaagcctatagcgagattggtatgaaaggggaacgcagaagaggcaaaggccacgacggactgtaccagggactcagcaccgccaccaaggacacctatgacgctcttcacatgcaggccctgccgcctcgg

SEQ ID NO: 634 - protein, 241 aa, synthetic construct
  REGION 1..241: note = source = /note="Description of Artificial Sequence: Synthetic polypeptide"
EVQLVETGGGVVQPGGSLRLSCAVSGFALSNHGMSWVRRAPGKGLEWVSGIVYSGSTYYAASVKGRFTISRDNSRNTLYLQMNSLRPEDTAIYYCSAHGGESDVWGQGTTVTVSSASGGGGSGGRASGGGGSEIVLTQSPGTLSLSPGERATLSCRASQSVGSTNLAWYQQKPGQAPRLLIYDASNRATGIPDRFSGGGSGTDFTLTISRLEPEDFAVYYCQQYGSSPPWTFGQGTKVEIK

SEQ ID NO: 635 - DNA, 723 bp, synthetic construct
  misc_feature 1..723: note = source = /note="Description of Artificial Sequence: Synthetic polynucleotide"
  source 1..723: mol_type = other DNA
gaagtgcaattggtggagactggaggaggagtggtgcaacctggaggaagcctgagactgtcatgcgcggtgtcgggcttcgccctctccaaccacggaatgtcctgggtccgccgggcccctgggaaaggacttgaatgggtgtccggcatcgtgtactcgggttccacctactacgcggcctcagtgaagggccggtttactattagccgcgacaactccagaaacacactgtacctccaaatgaactcgctgcggccggaagataccgctatctactactgctccgcccatgggggagagtcggacgtctggggacagggcaccactgtcactgtgtccagcgcttccggcggtggtggaagcgggggacgggcctcaggaggcggtggcagcgagattgtgctgacccagtcccccgggaccctgagcctgtccccgggagaaagggccaccctctcctgtcgggcatcccagtccgtggggtctactaaccttgcatggtaccagcagaagcccggccaggcccctcgcctgctgatctacgacgcgtccaatagagccaccggcatcccggatcgcttcagcggaggcggatcgggcaccgacttcaccctcaccatttcaaggctggaaccggaggacttcgccgtgtactactgccagcagtatggttcgtccccaccctggacgttcggccaggggactaaggtcgagatcaag

SEQ ID NO: 636 - protein, 115 aa, synthetic construct
  REGION 1..115: note = source = /note="Description of Artificial Sequence: Synthetic polypeptide"
EVQLVETGGGVVQPGGSLRLSCAVSGFALSNHGMSWVRRAPGKGLEWVSGIVYSGSTYYAASVKGRFTISRDNSRNTLYLQMNSLRPEDTAIYYCSAHGGESDVWGQGTTVTVSS

SEQ ID NO: 637 - protein, 109 aa, synthetic construct
  REGION 1..109: note = source = /note="Description of Artificial Sequence: Synthetic polypeptide"
EIVLTQSPGTLSLSPGERATLSCRASQSVGSTNLAWYQQKPGQAPRLLIYDASNRATGIPDRFSGGGSGTDFTLTISRLEPEDFAVYYCQQYGSSPPWTFGQGTKVEIK

SEQ ID NO: 638 - protein, 485 aa, synthetic construct
  REGION 1..485: note = source = /note="Description of Artificial Sequence: Synthetic polypeptide"
MALPVTALLLPLALLLHAARPEVQLVETGGGVVQPGGSLRLSCAVSGFALSNHGMSWVRRAPGKGLEWVSGIVYSGSTYYAASVKGRFTISRDNSRNTLYLQMNSLRPEDTAIYYCSAHGGESDVWGQGTTVTVSSASGGGGSGGRASGGGGSEIVLTQSPGTLSLSPGERATLSCRASQSVGSTNLAWYQQKPGQAPRLLIYDASNRATGIPDRFSGGGSGTDFTLTISRLEPEDFAVYYCQQYGSSPPWTFGQGTKVEIKTTTPAPRPPTPAPTIASQPLSLRPEACRPAAGGAVHTRGLDFACDIYIWAPLAGTCGVLLLSLVITLYCKRGRKKLLYIFKQPFMRPVQTTQEEDGCSCRFPEEEEGGCELRVKFSRSADAPAYKQGQNQLYNELNLGRREEYDVLDKRRGRDPEMGGKPRRKNPQEGLYNELQKDKMAEAYSEIGMKGERRRGKGHDGLYQGLSTATKDTYDALHMQALPPR

SEQ ID NO: 639 - DNA, 1455 bp, synthetic construct
  misc_feature 1..1455: note = source = /note="Description of Artificial Sequence: Synthetic polynucleotide"
  source 1..1455: mol_type = other DNA
atggccctccctgtcaccgccctgctgcttccgctggctcttctgctccacgccgctcggcccgaagtgcaattggtggagactggaggaggagtggtgcaacctggaggaagcctgagactgtcatgcgcggtgtcgggcttcgccctctccaaccacggaatgtcctgggtccgccgggcccctgggaaaggacttgaatgggtgtccggcatcgtgtactcgggttccacctactacgcggcctcagtgaagggccggtttactattagccgcgacaactccagaaacacactgtacctccaaatgaactcgctgcggccggaagataccgctatctactactgctccgcccatgggggagagtcggacgtctggggacagggcaccactgtcactgtgtccagcgcttccggcggtggtggaagcgggggacgggcctcaggaggcggtggcagcgagattgtgctgacccagtcccccgggaccctgagcctgtccccgggagaaagggccaccctctcctgtcgggcatcccagtccgtggggtctactaaccttgcatggtaccagcagaagcccggccaggcccctcgcctgctgatctacgacgcgtccaatagagccaccggcatcccggatcgcttcagcggaggcggatcgggcaccgacttcaccctcaccatttcaaggctggaaccggaggacttcgccgtgtactactgccagcagtatggttcgtccccaccctggacgttcggccaggggactaaggtcgagatcaagaccactaccccagcaccgaggccacccaccccggctcctaccatcgcctcccagcctctgtccctgcgtccggaggcatgtagacccgcagctggtggggccgtgcatacccggggtcttgacttcgcctgcgatatctacatttgggcccctctggctggtacttgcggggtcctgctgctttcactcgtgatcactctttactgtaagcgcggtcggaagaagctgctgtacatctttaagcaacccttcatgaggcctgtgcagactactcaagaggaggacggctgttcatgccggttcccagaggaggaggaaggcggctgcgaactgcgcgtgaaattcagccgcagcgcagatgctccagcctacaagcaggggcagaaccagctctacaacgaactcaatcttggtcggagagaggagtacgacgtgctggacaagcggagaggacgggacccagaaatgggcgggaagccgcgcagaaagaatccccaagagggcctgtacaacgagctccaaaaggataagatggcagaagcctatagcgagattggtatgaaaggggaacgcagaagaggcaaaggccacgacggactgtaccagggactcagcaccgccaccaaggacacctatgacgctcttcacatgcaggccctgccgcctcgg

SEQ ID NO: 640 - protein, 239 aa, synthetic construct
  REGION 1..239: note = source = /note="Description of Artificial Sequence: Synthetic polypeptide"
QVQLVESGGGLVKPGGSLRLSCAASGFTFSDYYMSWIRQAPGKGLEWVSYISSSGSTIYYADSVKGRFTISRDNAKNSLYLQMNSLRAEDTAVYYCARESGDGMDVWGQGTTVTVSSASGGGGSGGRASGGGGSDIQMTQSPSSLSASVGDRVTITCRASQSISSYLNWYQQKPGKAPKLLIYAASSLQSGVPSRFSGSGSGTDFTLTISSLQPEDFATYYCQQSYTLAFGQGTKVDIK

SEQ ID NO: 641 - DNA, 717 bp, synthetic construct
  misc_feature 1..717: note = source = /note="Description of Artificial Sequence: Synthetic polynucleotide"
  source 1..717: mol_type = other DNA
caagtgcaactcgtggaatctggtggaggactcgtgaaacctggaggatcattgagactgtcatgcgcggcctcgggattcacgttctccgattactacatgagctggattcgccaggctccggggaagggactggaatgggtgtcctacatttcctcatccggctccaccatctactacgcggactccgtgaaggggagattcaccattagccgcgataacgccaagaacagcctgtaccttcagatgaactccctgcgggctgaagatactgccgtctactactgcgcaagggagagcggagatgggatggacgtctggggacagggtaccactgtgaccgtgtcgtcggcctccggcggagggggttcgggtggaagggccagcggcggcggaggcagcgacatccagatgacccagtccccctcatcgctgtccgcctccgtgggcgaccgcgtcaccatcacatgccgggcctcacagtcgatctcctcctacctcaattggtatcagcagaagcccggaaaggcccctaagcttctgatctacgcagcgtcctccctgcaatccggggtcccatctcggttctccggctcgggcagcggtaccgacttcactctgaccatctcgagcctgcagccggaggacttcgccacttactactgtcagcaaagctacaccctcgcgtttggccagggcaccaaagtggacatcaag

SEQ ID NO: 642 - protein, 117 aa, synthetic construct
  REGION 1..117: note = source = /note="Description of Artificial Sequence: Synthetic polypeptide"
QVQLVESGGGLVKPGGSLRLSCAASGFTFSDYYMSWIRQAPGKGLEWVSYISSSGSTIYYADSVKGRFTISRDNAKNSLYLQMNSLRAEDTAVYYCARESGDGMDVWGQGTTVTVSS

SEQ ID NO: 643 - protein, 105 aa, synthetic construct
  REGION 1..105: note = source = /note="Description of Artificial Sequence: Synthetic polypeptide"
DIQMTQSPSSLSASVGDRVTITCRASQSISSYLNWYQQKPGKAPKLLIYAASSLQSGVPSRFSGSGSGTDFTLTISSLQPEDFATYYCQQSYTLAFGQGTKVDIK

SEQ ID NO: 644 - protein, 483 aa, synthetic construct
  REGION 1..483: note = source = /note="Description of Artificial Sequence: Synthetic polypeptide"
MALPVTALLLPLALLLHAARPQVQLVESGGGLVKPGGSLRLSCAASGFTFSDYYMSWIRQAPGKGLEWVSYISSSGSTIYYADSVKGRFTISRDNAKNSLYLQMNSLRAEDTAVYYCARESGDGMDVWGQGTTVTVSSASGGGGSGGRASGGGGSDIQMTQSPSSLSASVGDRVTITCRASQSISSYLNWYQQKPGKAPKLLIYAASSLQSGVPSRFSGSGSGTDFTLTISSLQPEDFATYYCQQSYTLAFGQGTKVDIKTTTPAPRPPTPAPTIASQPLSLRPEACRPAAGGAVHTRGLDFACDIYIWAPLAGTCGVLLLSLVITLYCKRGRKKLLYIFKQPFMRPVQTTQEEDGCSCRFPEEEEGGCELRVKFSRSADAPAYKQGQNQLYNELNLGRREEYDVLDKRRGRDPEMGGKPRRKNPQEGLYNELQKDKMAEAYSEIGMKGERRRGKGHDGLYQGLSTATKDTYDALHMQALPPR

SEQ ID NO: 645 - DNA, 1449 bp, synthetic construct
  misc_feature 1..1449: note = source = /note="Description of Artificial Sequence: Synthetic polynucleotide"
  source 1..1449: mol_type = other DNA
atggccctccctgtcaccgccctgctgcttccgctggctcttctgctccacgccgctcggccccaagtgcaactcgtggaatctggtggaggactcgtgaaacctggaggatcattgagactgtcatgcgcggcctcgggattcacgttctccgattactacatgagctggattcgccaggctccggggaagggactggaatgggtgtcctacatttcctcatccggctccaccatctactacgcggactccgtgaaggggagattcaccattagccgcgataacgccaagaacagcctgtaccttcagatgaactccctgcgggctgaagatactgccgtctactactgcgcaagggagagcggagatgggatggacgtctggggacagggtaccactgtgaccgtgtcgtcggcctccggcggagggggttcgggtggaagggccagcggcggcggaggcagcgacatccagatgacccagtccccctcatcgctgtccgcctccgtgggcgaccgcgtcaccatcacatgccgggcctcacagtcgatctcctcctacctcaattggtatcagcagaagcccggaaaggcccctaagcttctgatctacgcagcgtcctccctgcaatccggggtcccatctcggttctccggctcgggcagcggtaccgacttcactctgaccatctcgagcctgcagccggaggacttcgccacttactactgtcagcaaagctacaccctcgcgtttggccagggcaccaaagtggacatcaagaccactaccccagcaccgaggccacccaccccggctcctaccatcgcctcccagcctctgtccctgcgtccggaggcatgtagacccgcagctggtggggccgtgcatacccggggtcttgacttcgcctgcgatatctacatttgggcccctctggctggtacttgcggggtcctgctgctttcactcgtgatcactctttactgtaagcgcggtcggaagaagctgctgtacatctttaagcaacccttcatgaggcctgtgcagactactcaagaggaggacggctgttcatgccggttcccagaggaggaggaaggcggctgcgaactgcgcgtgaaattcagccgcagcgcagatgctccagcctacaagcaggggcagaaccagctctacaacgaactcaatcttggtcggagagaggagtacgacgtgctggacaagcggagaggacgggacccagaaatgggcgggaagccgcgcagaaagaatccccaagagggcctgtacaacgagctccaaaaggataagatggcagaagcctatagcgagattggtatgaaaggggaacgcagaagaggcaaaggccacgacggactgtaccagggactcagcaccgccaccaaggacacctatgacgctcttcacatgcaggccctgccgcctcgg

SEQ ID NO: 646 - protein, 246 aa, synthetic construct
  REGION 1..246: note = source = /note="Description of Artificial Sequence: Synthetic polypeptide"
QVQLVQSGGGLVKPGGSLRLSCAASGFTFSDYYMSWIRQAPGKGLEWVSYISSSGNTIYYADSVKGRFTISRDNAKNSLYLQMNSLRAEDTAVYYCARSTMVREDYWGQGTLVTVSSASGGGGSGGRASGGGGSDIVLTQSPLSLPVTLGQPASISCKSSESLVHNSGKTYLNWFHQRPGQSPRRLIYEVSNRDSGVPDRFTGSGSGTDFTLKISRVEAEDVGVYYCMQGTHWPGTFGQGTKLEIK

SEQ ID NO: 647 - DNA, 738 bp, synthetic construct
  misc_feature 1..738: note = source = /note="Description of Artificial Sequence: Synthetic polynucleotide"
  source 1..738: mol_type = other DNA
caagtgcaactggtgcaaagcggaggaggattggtcaaacccggaggaagcctgagactgtcatgcgcggcctctggattcaccttctccgattactacatgtcatggatcagacaggccccggggaagggcctcgaatgggtgtcctacatctcgtcctccgggaacaccatctactacgccgacagcgtgaagggccgctttaccatttcccgcgacaacgcaaagaactcgctgtaccttcagatgaattccctgcgggctgaagataccgcggtgtactattgcgcccggtccactatggtccgggaggactactggggacagggcacactcgtgaccgtgtccagcgcgagcgggggtggaggcagcggtggacgcgcctccggcggcggcggttcagacatcgtgctgactcagtcgcccctgtcgctgccggtcaccctgggccaaccggcctcaattagctgcaagtcctcggagagcctggtgcacaactcaggaaagacttacctgaactggttccatcagcggcctggacagtccccacggaggctcatctatgaagtgtccaacagggattcgggggtgcccgaccgcttcactggctccgggtccggcaccgacttcaccttgaaaatctccagagtggaagccgaggacgtgggcgtgtactactgtatgcagggtacccactggcctggaacctttggacaaggaactaagctcgagattaag

SEQ ID NO: 648 - protein, 117 aa, synthetic construct
  REGION 1..117: note = source = /note="Description of Artificial Sequence: Synthetic polypeptide"
QVQLVQSGGGLVKPGGSLRLSCAASGFTFSDYYMSWIRQAPGKGLEWVSYISSSGNTIYYADSVKGRFTISRDNAKNSLYLQMNSLRAEDTAVYYCARSTMVREDYWGQGTLVTVSS

SEQ ID NO: 649 - protein, 112 aa, synthetic construct
  REGION 1..112: note = source = /note="Description of Artificial Sequence: Synthetic polypeptide"
DIVLTQSPLSLPVTLGQPASISCKSSESLVHNSGKTYLNWFHQRPGQSPRRLIYEVSNRDSGVPDRFTGSGSGTDFTLKISRVEAEDVGVYYCMQGTHWPGTFGQGTKLEIK

SEQ ID NO: 650 - protein, 490 aa, synthetic construct
  REGION 1..490: note = source = /note="Description of Artificial Sequence: Synthetic polypeptide"
MALPVTALLLPLALLLHAARPQVQLVQSGGGLVKPGGSLRLSCAASGFTFSDYYMSWIRQAPGKGLEWVSYISSSGNTIYYADSVKGRFTISRDNAKNSLYLQMNSLRAEDTAVYYCARSTMVREDYWGQGTLVTVSSASGGGGSGGRASGGGGSDIVLTQSPLSLPVTLGQPASISCKSSESLVHNSGKTYLNWFHQRPGQSPRRLIYEVSNRDSGVPDRFTGSGSGTDFTLKISRVEAEDVGVYYCMQGTHWPGTFGQGTKLEIKTTTPAPRPPTPAPTIASQPLSLRPEACRPAAGGAVHTRGLDFACDIYIWAPLAGTCGVLLLSLVITLYCKRGRKKLLYIFKQPFMRPVQTTQEEDGCSCRFPEEEEGGCELRVKFSRSADAPAYKQGQNQLYNELNLGRREEYDVLDKRRGRDPEMGGKPRRKNPQEGLYNELQKDKMAEAYSEIGMKGERRRGKGHDGLYQGLSTATKDTYDALHMQALPPR

SEQ ID NO: 651 - DNA, 1470 bp, synthetic construct
  misc_feature 1..1470: note = source = /note="Description of Artificial Sequence: Synthetic polynucleotide"
  source 1..1470: mol_type = other DNA
atggccctccctgtcaccgccctgctgcttccgctggctcttctgctccacgccgctcggccccaagtgcaactggtgcaaagcggaggaggattggtcaaacccggaggaagcctgagactgtcatgcgcggcctctggattcaccttctccgattactacatgtcatggatcagacaggccccggggaagggcctcgaatgggtgtcctacatctcgtcctccgggaacaccatctactacgccgacagcgtgaagggccgctttaccatttcccgcgacaacgcaaagaactcgctgtaccttcagatgaattccctgcgggctgaagataccgcggtgtactattgcgcccggtccactatggtccgggaggactactggggacagggcacactcgtgaccgtgtccagcgcgagcgggggtggaggcagcggtggacgcgcctccggcggcggcggttcagacatcgtgctgactcagtcgcccctgtcgctgccggtcaccctgggccaaccggcctcaattagctgcaagtcctcggagagcctggtgcacaactcaggaaagacttacctgaactggttccatcagcggcctggacagtccccacggaggctcatctatgaagtgtccaacagggattcgggggtgcccgaccgcttcactggctccgggtccggcaccgacttcaccttgaaaatctccagagtggaagccgaggacgtgggcgtgtactactgtatgcagggtacccactggcctggaacctttggacaaggaactaagctcgagattaagaccactaccccagcaccgaggccacccaccccggctcctaccatcgcctcccagcctctgtccctgcgtccggaggcatgtagacccgcagctggtggggccgtgcatacccggggtcttgacttcgcctgcgatatctacatttgggcccctctggctggtacttgcggggtcctgctgctttcactcgtgatcactctttactgtaagcgcggtcggaagaagctgctgtacatctttaagcaacccttcatgaggcctgtgcagactactcaagaggaggacggctgttcatgccggttcccagaggaggaggaaggcggctgcgaactgcgcgtgaaattcagccgcagcgcagatgctccagcctacaagcaggggcagaaccagctctacaacgaactcaatcttggtcggagagaggagtacgacgtgctggacaagcggagaggacgggacccagaaatgggcgggaagccgcgcagaaagaatccccaagagggcctgtacaacgagctccaaaaggataagatggcagaagcctatagcgagattggtatgaaaggggaacgcagaagaggcaaaggccacgacggactgtaccagggactcagcaccgccaccaaggacacctatgacgctcttcacatgcaggccctgccgcctcgg

SEQ ID NO: 652 - protein, 239 aa, synthetic construct
  REGION 1..239: note = source = /note="Description of Artificial Sequence: Synthetic polypeptide"
QVQLVESGGGLVQPGGSLRLSCAVSGFALSNHGMSWVRRAPGKGLEWVSGIVYSGSTYYAASVKGRFTISRDNSRNTLYLQMNSLRPEDTAIYYCSAHGGESDVWGQGTTVTVSSASGGGGSGGRASGGGGSDIRLTQSPSPLSASVGDRVTITCQASEDINKFLNWYHQTPGKAPKLLIYDASTLQTGVPSRFSGSGSGTDFTLTINSLQPEDIGTYYCQQYESLPLTFGGGTKVEIK

SEQ ID NO: 653 - DNA, 717 bp, synthetic construct
  misc_feature 1..717: note = source = /note="Description of Artificial Sequence: Synthetic polynucleotide"
  source 1..717: mol_type = other DNA
caagtgcaactcgtggaatctggtggaggactcgtgcaacccggtggaagccttaggctgtcgtgcgccgtcagcgggtttgctctgagcaaccatggaatgtcctgggtccgccgggcaccgggaaaagggctggaatgggtgtccggcatcgtgtacagcgggtcaacctattacgccgcgtccgtgaagggcagattcactatctcaagagacaacagccggaacaccctgtacttgcaaatgaattccctgcgccccgaggacaccgccatctactactgctccgcccacggaggagagtcggacgtgtggggccagggaacgactgtgactgtgtccagcgcatcaggagggggtggttcgggcggccgggcctcggggggaggaggttccgacattcggctgacccagtccccgtccccactgtcggcctccgtcggcgaccgcgtgaccatcacttgtcaggcgtccgaggacattaacaagttcctgaactggtaccaccagacccctggaaaggcccccaagctgctgatctacgatgcctcgacccttcaaactggagtgcctagccggttctccgggtccggctccggcactgatttcactctgaccatcaactcattgcagccggaagatatcgggacctactattgccagcagtacgaatccctcccgctcacattcggcgggggaaccaaggtcgagattaag

SEQ ID NO: 654 - protein, 115 aa, synthetic construct
  REGION 1..115: note = source = /note="Description of Artificial Sequence: Synthetic polypeptide"
QVQLVESGGGLVQPGGSLRLSCAVSGFALSNHGMSWVRRAPGKGLEWVSGIVYSGSTYYAASVKGRFTISRDNSRNTLYLQMNSLRPEDTAIYYCSAHGGESDVWGQGTTVTVSS

SEQ ID NO: 655 - protein, 107 aa, synthetic construct
  REGION 1..107: note = source = /note="Description of Artificial Sequence: Synthetic polypeptide"
DIRLTQSPSPLSASVGDRVTITCQASEDINKFLNWYHQTPGKAPKLLIYDASTLQTGVPSRFSGSGSGTDFTLTINSLQPEDIGTYYCQQYESLPLTFGGGTKVEIK

SEQ ID NO: 656 - protein, 483 aa, synthetic construct
  REGION 1..483: note = source = /note="Description of Artificial Sequence: Synthetic polypeptide"
MALPVTALLLPLALLLHAARPQVQLVESGGGLVQPGGSLRLSCAVSGFALSNHGMSWVRRAPGKGLEWVSGIVYSGSTYYAASVKGRFTISRDNSRNTLYLQMNSLRPEDTAIYYCSAHGGESDVWGQGTTVTVSSASGGGGSGGRASGGGGSDIRLTQSPSPLSASVGDRVTITCQASEDINKFLNWYHQTPGKAPKLLIYDASTLQTGVPSRFSGSGSGTDFTLTINSLQPEDIGTYYCQQYESLPLTFGGGTKVEIKTTTPAPRPPTPAPTIASQPLSLRPEACRPAAGGAVHTRGLDFACDIYIWAPLAGTCGVLLLSLVITLYCKRGRKKLLYIFKQPFMRPVQTTQEEDGCSCRFPEEEEGGCELRVKFSRSADAPAYKQGQNQLYNELNLGRREEYDVLDKRRGRDPEMGGKPRRKNPQEGLYNELQKDKMAEAYSEIGMKGERRRGKGHDGLYQGLSTATKDTYDALHMQALPPR

SEQ ID NO: 657 - DNA, 1449 bp, synthetic construct
  misc_feature 1..1449: note = source = /note="Description of Artificial Sequence: Synthetic polynucleotide"
  source 1..1449: mol_type = other DNA
atggccctccctgtcaccgccctgctgcttccgctggctcttctgctccacgccgctcggccccaagtgcaactcgtggaatctggtggaggactcgtgcaacccggtggaagccttaggctgtcgtgcgccgtcagcgggtttgctctgagcaaccatggaatgtcctgggtccgccgggcaccgggaaaagggctggaatgggtgtccggcatcgtgtacagcgggtcaacctattacgccgcgtccgtgaagggcagattcactatctcaagagacaacagccggaacaccctgtacttgcaaatgaattccctgcgccccgaggacaccgccatctactactgctccgcccacggaggagagtcggacgtgtggggccagggaacgactgtgactgtgtccagcgcatcaggagggggtggttcgggcggccgggcctcggggggaggaggttccgacattcggctgacccagtccccgtccccactgtcggcctccgtcggcgaccgcgtgaccatcacttgtcaggcgtccgaggacattaacaagttcctgaactggtaccaccagacccctggaaaggcccccaagctgctgatctacgatgcctcgacccttcaaactggagtgcctagccggttctccgggtccggctccggcactgatttcactctgaccatcaactcattgcagccggaagatatcgggacctactattgccagcagtacgaatccctcccgctcacattcggcgggggaaccaaggtcgagattaagaccactaccccagcaccgaggccacccaccccggctcctaccatcgcctcccagcctctgtccctgcgtccggaggcatgtagacccgcagctggtggggccgtgcatacccggggtcttgacttcgcctgcgatatctacatttgggcccctctggctggtacttgcggggtcctgctgctttcactcgtgatcactctttactgtaagcgcggtcggaagaagctgctgtacatctttaagcaacccttcatgaggcctgtgcagactactcaagaggaggacggctgttcatgccggttcccagaggaggaggaaggcggctgcgaactgcgcgtgaaattcagccgcagcgcagatgctccagcctacaagcaggggcagaaccagctctacaacgaactcaatcttggtcggagagaggagtacgacgtgctggacaagcggagaggacgggacccagaaatgggcgggaagccgcgcagaaagaatccccaagagggcctgtacaacgagctccaaaaggataagatggcagaagcctatagcgagattggtatgaaaggggaacgcagaagaggcaaaggccacgacggactgtaccagggactcagcaccgccaccaaggacacctatgacgctcttcacatgcaggccctgccgcctcgg

SEQ ID NO: 658 - protein, 240 aa, synthetic construct
  REGION 1..240: note = source = /note="Description of Artificial Sequence: Synthetic polypeptide"
EVQLVETGGGLVQPGGSLRLSCAVSGFALSNHGMSWVRRAPGKGLEWVSGIVYSGSTYYAASVKGRFTISRDNSRNTLYLQMNSLRPEDTAIYYCSAHGGESDVWGQGTTVTVSSASGGGGSGGRASGGGGSETTLTQSPATLSVSPGERATLSCRASQSVGSNLAWYQQKPGQGPRLLIYGASTRATGIPARFSGSGSGTEFTLTISSLQPEDFAVYYCQQYNDWLPVTFGQGTKVEIK

SEQ ID NO: 659 - DNA, 720 bp, synthetic construct
  misc_feature 1..720: note = source = /note="Description of Artificial Sequence: Synthetic polynucleotide"
  source 1..720: mol_type = other DNA
gaagtgcaattggtggaaactggaggaggacttgtgcaacctggaggatcattgcggctctcatgcgctgtctccggcttcgccctgtcaaatcacgggatgtcgtgggtcagacgggccccgggaaagggtctggaatgggtgtcggggattgtgtacagcggctccacctactacgccgcttcggtcaagggccgcttcactatttcacgggacaacagccgcaacaccctctatctgcaaatgaactctctccgcccggaggataccgccatctactactgctccgcacacggcggcgaatccgacgtgtggggacagggaaccactgtcaccgtgtcgtccgcatccggtggcggaggatcgggtggccgggcctccgggggcggcggcagcgagactaccctgacccagtcccctgccactctgtccgtgagcccgggagagagagccacccttagctgccgggccagccagagcgtgggctccaacctggcctggtaccagcagaagccaggacagggtcccaggctgctgatctacggagcctccactcgcgcgaccggcatccccgcgaggttctccgggtcgggttccgggaccgagttcaccctgaccatctcctccctccaaccggaggacttcgcggtgtactactgtcagcagtacaacgattggctgcccgtgacatttggacaggggacgaaggtggaaatcaaa

SEQ ID NO: 660 - protein, 108 aa, synthetic construct
  REGION 1..108: note = source = /note="Description of Artificial Sequence: Synthetic polypeptide"
ETTLTQSPATLSVSPGERATLSCRASQSVGSNLAWYQQKPGQGPRLLIYGASTRATGIPARFSGSGSGTEFTLTISSLQPEDFAVYYCQQYNDWLPVTFGQGTKVEIK

SEQ ID NO: 661 - protein, 484 aa, synthetic construct
  REGION 1..484: note = source = /note="Description of Artificial Sequence: Synthetic polypeptide"
MALPVTALLLPLALLLHAARPEVQLVETGGGLVQPGGSLRLSCAVSGFALSNHGMSWVRRAPGKGLEWVSGIVYSGSTYYAASVKGRFTISRDNSRNTLYLQMNSLRPEDTAIYYCSAHGGESDVWGQGTTVTVSSASGGGGSGGRASGGGGSETTLTQSPATLSVSPGERATLSCRASQSVGSNLAWYQQKPGQGPRLLIYGASTRATGIPARFSGSGSGTEFTLTISSLQPEDFAVYYCQQYNDWLPVTFGQGTKVEIKTTTPAPRPPTPAPTIASQPLSLRPEACRPAAGGAVHTRGLDFACDIYIWAPLAGTCGVLLLSLVITLYCKRGRKKLLYIFKQPFMRPVQTTQEEDGCSCRFPEEEEGGCELRVKFSRSADAPAYKQGQNQLYNELNLGRREEYDVLDKRRGRDPEMGGKPRRKNPQEGLYNELQKDKMAEAYSEIGMKGERRRGKGHDGLYQGLSTATKDTYDALHMQALPPR

SEQ ID NO: 662 - DNA, 1452 bp, synthetic construct
  misc_feature 1..1452: note = source = /note="Description of Artificial Sequence: Synthetic polynucleotide"
  source 1..1452: mol_type = other DNA
atggccctccctgtcaccgccctgctgcttccgctggctcttctgctccacgccgctcggcccgaagtgcaattggtggaaactggaggaggacttgtgcaacctggaggatcattgcggctctcatgcgctgtctccggcttcgccctgtcaaatcacgggatgtcgtgggtcagacgggccccgggaaagggtctggaatgggtgtcggggattgtgtacagcggctccacctactacgccgcttcggtcaagggccgcttcactatttcacgggacaacagccgcaacaccctctatctgcaaatgaactctctccgcccggaggataccgccatctactactgctccgcacacggcggcgaatccgacgtgtggggacagggaaccactgtcaccgtgtcgtccgcatccggtggcggaggatcgggtggccgggcctccgggggcggcggcagcgagactaccctgacccagtcccctgccactctgtccgtgagcccgggagagagagccacccttagctgccgggccagccagagcgtgggctccaacctggcctggtaccagcagaagccaggacagggtcccaggctgctgatctacggagcctccactcgcgcgaccggcatccccgcgaggttctccgggtcgggttccgggaccgagttcaccctgaccatctcctccctccaaccggaggacttcgcggtgtactactgtcagcagtacaacgattggctgcccgtgacatttggacaggggacgaaggtggaaatcaaaaccactaccccagcaccgaggccacccaccccggctcctaccatcgcctcccagcctctgtccctgcgtccggaggcatgtagacccgcagctggtggggccgtgcatacccggggtcttgacttcgcctgcgatatctacatttgggcccctctggctggtacttgcggggtcctgctgctttcactcgtgatcactctttactgtaagcgcggtcggaagaagctgctgtacatctttaagcaacccttcatgaggcctgtgcagactactcaagaggaggacggctgttcatgccggttcccagaggaggaggaaggcggctgcgaactgcgcgtgaaattcagccgcagcgcagatgctccagcctacaagcaggggcagaaccagctctacaacgaactcaatcttggtcggagagaggagtacgacgtgctggacaagcggagaggacgggacccagaaatgggcgggaagccgcgcagaaagaatccccaagagggcctgtacaacgagctccaaaaggataagatggcagaagcctatagcgagattggtatgaaaggggaacgcagaagaggcaaaggccacgacggactgtaccagggactcagcaccgccaccaaggacacctatgacgctcttcacatgcaggccctgccgcctcgg

SEQ ID NO: 663 - protein, 241 aa, synthetic construct
  REGION 1..241: note = source = /note="Description of Artificial Sequence: Synthetic polypeptide"
EVQLVESGGGLVQPGGSLRLSCAVSGFALSNHGMSWVRRAPGKGLEWVSGIVYSGSTYYAASVKGRFTISRDNSRNTLYLQMNSLRPEDTAIYYCSAHGGESDVWGQGTTVTVSSASGGGGSGGRASGGGGSEIVLTQSPGTLSLSPGERATLSCRASQSIGSSSLAWYQQKPGQAPRLLMYGASSRASGIPDRFSGSGSGTDFTLTISRLEPEDFAVYYCQQYAGSPPFTFGQGTKVEIK

SEQ ID NO: 664 - DNA, 723 bp, synthetic construct
  misc_feature 1..723: note = source = /note="Description of Artificial Sequence: Synthetic polynucleotide"
  source 1..723: mol_type = other DNA
gaagtgcaattggtggaatctggtggaggacttgtgcaacctggaggatcactgagactgtcatgcgcggtgtccggttttgccctgagcaatcatgggatgtcgtgggtccggcgcgcccccggaaagggtctggaatgggtgtcgggtatcgtctactccgggagcacttactacgccgcgagcgtgaagggccgcttcaccatttcccgcgataactcccgcaacaccctgtacttgcaaatgaactcgctccggcctgaggacactgccatctactactgctccgcacacggaggagaatccgacgtgtggggccagggaactaccgtgaccgtcagcagcgcctccggcggcgggggctcaggcggacgggctagcggcggcggtggctccgagatcgtgctgacccagtcgcctggcactctctcgctgagccccggggaaagggcaaccctgtcctgtcgggccagccagtccattggatcatcctccctcgcctggtatcagcagaaaccgggacaggctccgcggctgcttatgtatggggccagctcaagagcctccggcattcccgaccggttctccgggtccggttccggcaccgatttcaccctgactatctcgaggctggagccagaggacttcgccgtgtactactgccagcagtacgcggggtccccgccgttcacgttcggacagggaaccaaggtcgagatcaag

SEQ ID NO: 665 - protein, 109 aa, synthetic construct
  REGION 1..109: note = source = /note="Description of Artificial Sequence: Synthetic polypeptide"
EIVLTQSPGTLSLSPGERATLSCRASQSIGSSSLAWYQQKPGQAPRLLMYGASSRASGIPDRFSGSGSGTDFTLTISRLEPEDFAVYYCQQYAGSPPFTFGQGTKVEIK

SEQ ID NO: 666 - protein, 485 aa, synthetic construct
  REGION 1..485: note = source = /note="Description of Artificial Sequence: Synthetic polypeptide"
MALPVTALLLPLALLLHAARPEVQLVESGGGLVQPGGSLRLSCAVSGFALSNHGMSWVRRAPGKGLEWVSGIVYSGSTYYAASVKGRFTISRDNSRNTLYLQMNSLRPEDTAIYYCSAHGGESDVWGQGTTVTVSSASGGGGSGGRASGGGGSEIVLTQSPGTLSLSPGERATLSCRASQSIGSSSLAWYQQKPGQAPRLLMYGASSRASGIPDRFSGSGSGTDFTLTISRLEPEDFAVYYCQQYAGSPPFTFGQGTKVEIKTTTPAPRPPTPAPTIASQPLSLRPEACRPAAGGAVHTRGLDFACDIYIWAPLAGTCGVLLLSLVITLYCKRGRKKLLYIFKQPFMRPVQTTQEEDGCSCRFPEEEEGGCELRVKFSRSADAPAYKQGQNQLYNELNLGRREEYDVLDKRRGRDPEMGGKPRRKNPQEGLYNELQKDKMAEAYSEIGMKGERRRGKGHDGLYQGLSTATKDTYDALHMQALPPR

SEQ ID NO: 667 - DNA, 1455 bp, synthetic construct
  misc_feature 1..1455: note = source = /note="Description of Artificial Sequence: Synthetic polynucleotide"
  source 1..1455: mol_type = other DNA
atggccctccctgtcaccgccctgctgcttccgctggctcttctgctccacgccgctcggcccgaagtgcaattggtggaatctggtggaggacttgtgcaacctggaggatcactgagactgtcatgcgcggtgtccggttttgccctgagcaatcatgggatgtcgtgggtccggcgcgcccccggaaagggtctggaatgggtgtcgggtatcgtctactccgggagcacttactacgccgcgagcgtgaagggccgcttcaccatttcccgcgataactcccgcaacaccctgtacttgcaaatgaactcgctccggcctgaggacactgccatctactactgctccgcacacggaggagaatccgacgtgtggggccagggaactaccgtgaccgtcagcagcgcctccggcggcgggggctcaggcggacgggctagcggcggcggtggctccgagatcgtgctgacccagtcgcctggcactctctcgctgagccccggggaaagggcaaccctgtcctgtcgggccagccagtccattggatcatcctccctcgcctggtatcagcagaaaccgggacaggctccgcggctgcttatgtatggggccagctcaagagcctccggcattcccgaccggttctccgggtccggttccggcaccgatttcaccctgactatctcgaggctggagccagaggacttcgccgtgtactactgccagcagtacgcggggtccccgccgttcacgttcggacagggaaccaaggtcgagatcaagaccactaccccagcaccgaggccacccaccccggctcctaccatcgcctcccagcctctgtccctgcgtccggaggcatgtagacccgcagctggtggggccgtgcatacccggggtcttgacttcgcctgcgatatctacatttgggcccctctggctggtacttgcggggtcctgctgctttcactcgtgatcactctttactgtaagcgcggtcggaagaagctgctgtacatctttaagcaacccttcatgaggcctgtgcagactactcaagaggaggacggctgttcatgccggttcccagaggaggaggaaggcggctgcgaactgcgcgtgaaattcagccgcagcgcagatgctccagcctacaagcaggggcagaaccagctctacaacgaactcaatcttggtcggagagaggagtacgacgtgctggacaagcggagaggacgggacccagaaatgggcgggaagccgcgcagaaagaatccccaagagggcctgtacaacgagctccaaaaggataagatggcagaagcctatagcgagattggtatgaaaggggaacgcagaagaggcaaaggccacgacggactgtaccagggactcagcaccgccaccaaggacacctatgacgctcttcacatgcaggccctgccgcctcgg

SEQ ID NO: 668 - protein, 243 aa, synthetic construct
  REGION 1..243: note = source = /note="Description of Artificial Sequence: Synthetic polypeptide"
QVQLQESGPGLVKPSETLSLTCTVSGGSISSSYYYWGWIRQPPGKGLEWIGSIYYSGSAYYNPSLKSRVTISVDTSKNQFSLRLSSVTAADTAVYYCARHWQEWPDAFDIWGQGTMVTVSSGGGGSGGGGSGGGGSETTLTQSPAFMSATPGDKVIISCKASQDIDDAMNWYQQKPGEAPLFIIQSATSPVPGIPPRFSGSGFGTDFSLTINNIESEDAAYYFCLQHDNFPLTFGQGTKLEIK

SEQ ID NO: 669 - DNA, 729 bp, synthetic construct
  misc_feature 1..729: note = source = /note="Description of Artificial Sequence: Synthetic polynucleotide"
  source 1..729: mol_type = other DNA
caagtgcagcttcaggaaagcggaccgggcctggtcaagccatccgaaactctctccctgacttgcactgtgtctggcggttccatctcatcgtcgtactactactggggctggattaggcagccgcccggaaagggactggagtggatcggaagcatctactattccggctcggcgtactacaaccctagcctcaagtcgagagtgaccatctccgtggatacctccaagaaccagttttccctgcgcctgagctccgtgaccgccgctgacaccgccgtgtactactgtgctcggcattggcaggaatggcccgatgccttcgacatttggggccagggcactatggtcactgtgtcatccgggggtggaggcagcgggggaggagggtccggggggggaggttcagagacaaccttgacccagtcacccgcattcatgtccgccactccgggagacaaggtcatcatctcgtgcaaagcgtcccaggatatcgacgatgccatgaattggtaccagcagaagcctggcgaagcgccgctgttcattatccaatccgcaacctcgcccgtgcctggaatcccaccgcggttcagcggcagcggtttcggaaccgacttttccctgaccattaacaacattgagtccgaggacgccgcctactacttctgcctgcaacacgacaacttccctctcacgttcggccagggaaccaagctggaaatcaag

SEQ ID NO: 670 - protein, 121 aa, synthetic construct
  REGION 1..121: note = source = /note="Description of Artificial Sequence: Synthetic polypeptide"
QVQLQESGPGLVKPSETLSLTCTVSGGSISSSYYYWGWIRQPPGKGLEWIGSIYYSGSAYYNPSLKSRVTISVDTSKNQFSLRLSSVTAADTAVYYCARHWQEWPDAFDIWGQGTMVTVSS

SEQ ID NO: 671 - protein, 107 aa, synthetic construct
  REGION 1..107: note = source = /note="Description of Artificial Sequence: Synthetic polypeptide"
ETTLTQSPAFMSATPGDKVIISCKASQDIDDAMNWYQQKPGEAPLFIIQSATSPVPGIPPRFSGSGFGTDFSLTINNIESEDAAYYFCLQHDNFPLTFGQGTKLEIK

SEQ ID NO: 672 - protein, 487 aa, synthetic construct
  REGION 1..487: note = source = /note="Description of Artificial Sequence: Synthetic polypeptide"
MALPVTALLLPLALLLHAARPQVQLQESGPGLVKPSETLSLTCTVSGGSISSSYYYWGWIRQPPGKGLEWIGSIYYSGSAYYNPSLKSRVTISVDTSKNQFSLRLSSVTAADTAVYYCARHWQEWPDAFDIWGQGTMVTVSSGGGGSGGGGSGGGGSETTLTQSPAFMSATPGDKVIISCKASQDIDDAMNWYQQKPGEAPLFIIQSATSPVPGIPPRFSGSGFGTDFSLTINNIESEDAAYYFCLQHDNFPLTFGQGTKLEIKTTTPAPRPPTPAPTIASQPLSLRPEACRPAAGGAVHTRGLDFACDIYIWAPLAGTCGVLLLSLVITLYCKRGRKKLLYIFKQPFMRPVQTTQEEDGCSCRFPEEEEGGCELRVKFSRSADAPAYKQGQNQLYNELNLGRREEYDVLDKRRGRDPEMGGKPRRKNPQEGLYNELQKDKMAEAYSEIGMKGERRRGKGHDGLYQGLSTATKDTYDALHMQALPPR

SEQ ID NO: 673 - DNA, 1461 bp, synthetic construct
  misc_feature 1..1461: note = source = /note="Description of Artificial Sequence: Synthetic polynucleotide"
  source 1..1461: mol_type = other DNA
atggccctccctgtcaccgccctgctgcttccgctggctcttctgctccacgccgctcggccccaagtgcagcttcaggaaagcggaccgggcctggtcaagccatccgaaactctctccctgacttgcactgtgtctggcggttccatctcatcgtcgtactactactggggctggattaggcagccgcccggaaagggactggagtggatcggaagcatctactattccggctcggcgtactacaaccctagcctcaagtcgagagtgaccatctccgtggatacctccaagaaccagttttccctgcgcctgagctccgtgaccgccgctgacaccgccgtgtactactgtgctcggcattggcaggaatggcccgatgccttcgacatttggggccagggcactatggtcactgtgtcatccgggggtggaggcagcgggggaggagggtccggggggggaggttcagagacaaccttgacccagtcacccgcattcatgtccgccactccgggagacaaggtcatcatctcgtgcaaagcgtcccaggatatcgacgatgccatgaattggtaccagcagaagcctggcgaagcgccgctgttcattatccaatccgcaacctcgcccgtgcctggaatcccaccgcggttcagcggcagcggtttcggaaccgacttttccctgaccattaacaacattgagtccgaggacgccgcctactacttctgcctgcaacacgacaacttccctctcacgttcggccagggaaccaagctggaaatcaagaccactaccccagcaccgaggccacccaccccggctcctaccatcgcctcccagcctctgtccctgcgtccggaggcatgtagacccgcagctggtggggccgtgcatacccggggtcttgacttcgcctgcgatatctacatttgggcccctctggctggtacttgcggggtcctgctgctttcactcgtgatcactctttactgtaagcgcggtcggaagaagctgctgtacatctttaagcaacccttcatgaggcctgtgcagactactcaagaggaggacggctgttcatgccggttcccagaggaggaggaaggcggctgcgaactgcgcgtgaaattcagccgcagcgcagatgctccagcctacaagcaggggcagaaccagctctacaacgaactcaatcttggtcggagagaggagtacgacgtgctggacaagcggagaggacgggacccagaaatgggcgggaagccgcgcagaaagaatccccaagagggcctgtacaacgagctccaaaaggataagatggcagaagcctatagcgagattggtatgaaaggggaacgcagaagaggcaaaggccacgacggactgtaccagggactcagcaccgccaccaaggacacctatgacgctcttcacatgcaggccctgccgcctcgg

SEQ ID NO: 674 - protein, 244 aa, synthetic construct
  REGION 1..244: note = source = /note="Description of Artificial Sequence: Synthetic polypeptide"
VNLRESGPALVKPTQTLTLTCTFSGFSLRTSGMCVSWIRQPPGKALEWLARIDWDEDKFYSTSLKTRLTISKDTSDNQVVLRMTNMDPADTATYYCARSGAGGTSATAFDIWGPGTMVTVSSGGGGSGGGGSGGGGSDIQMTQSPSSLSASVGDRVTITCRASQDIYNNLAWFQLKPGSAPRSLMYAANKSQSGVPSRFSGSASGTDFTLTISSLQPEDFATYYCQHYYRFPYSFGQGTKLEIK

SEQ ID NO: 675 - DNA, 735 bp, synthetic construct
  misc_feature 1..735: note = source = /note="Description of Artificial Sequence: Synthetic polynucleotide"
  source 1..735: mol_type = other DNA
caagtcaatctgcgcgaatccggccccgccttggtcaagcctacccagaccctcactctgacctgtactttctccggcttctccctgcggacttccgggatgtgcgtgtcctggatcagacagcctccgggaaaggccctggagtggctcgctcgcattgactgggatgaggacaagttctactccacctcactcaagaccaggctgaccatcagcaaagatacctctgacaaccaagtggtgctccgcatgaccaacatggacccagccgacactgccacttactactgcgcgaggagcggagcgggcggaacctccgccaccgccttcgatatttggggcccgggtaccatggtcaccgtgtcaagcggaggaggggggtccgggggcggcggttccgggggaggcggatcggacattcagatgactcagtcaccatcgtccctgagcgctagcgtgggcgacagagtgacaatcacttgccgggcatcccaggacatctataacaaccttgcgtggttccagctgaagcctggttccgcaccgcggtcacttatgtacgccgccaacaagagccagtcgggagtgccgtcccggttttccggttcggcctcgggaactgacttcaccctgacgatctccagcctgcaacccgaggatttcgccacctactactgccagcactactaccgctttccctactcgttcggacagggaaccaagctggaaatcaag

SEQ ID NO: 676 - protein, 123 aa, synthetic construct
  REGION 1..123: note = source = /note="Description of Artificial Sequence: Synthetic polypeptide"
QVNLRESGPALVKPTQTLTLTCTFSGFSLRTSGMCVSWIRQPPGKALEWLARIDWDEDKFYSTSLKTRLTISKDTSDNQVVLRMTNMDPADTATYYCARSGAGGTSATAFDIWGPGTMVTVSS

SEQ ID NO: 677 - protein, 107 aa, synthetic construct
  REGION 1..107: note = source = /note="Description of Artificial Sequence: Synthetic polypeptide"
DIQMTQSPSSLSASVGDRVTITCRASQDIYNNLAWFQLKPGSAPRSLMYAANKSQSGVPSRFSGSASGTDFTLTISSLQPEDFATYYCQHYYRFPYSFGQGTKLEIK

SEQ ID NO: 678 - protein, 489 aa, synthetic construct
  REGION 1..489: note = source = /note="Description of Artificial Sequence: Synthetic polypeptide"
MALPVTALLLPLALLLHAARPQVNLRESGPALVKPTQTLTLTCTFSGFSLRTSGMCVSWIRQPPGKALEWLARIDWDEDKFYSTSLKTRLTISKDTSDNQVVLRMTNMDPADTATYYCARSGAGGTSATAFDIWGPGTMVTVSSGGGGSGGGGSGGGGSDIQMTQSPSSLSASVGDRVTITCRASQDIYNNLAWFQLKPGSAPRSLMYAANKSQSGVPSRFSGSASGTDFTLTISSLQPEDFATYYCQHYYRFPYSFGQGTKLEIKTTTPAPRPPTPAPTIASQPLSLRPEACRPAAGGAVHTRGLDFACDIYIWAPLAGTCGVLLLSLVITLYCKRGRKKLLYIFKQPFMRPVQTTQEEDGCSCRFPEEEEGGCELRVKFSRSADAPAYKQGQNQLYNELNLGRREEYDVLDKRRGRDPEMGGKPRRKNPQEGLYNELQKDKMAEAYSEIGMKGERRRGKGHDGLYQGLSTATKDTYDALHMQALPPR

SEQ ID NO: 679 - DNA, 1467 bp, synthetic construct
  misc_feature 1..1467: note = source = /note="Description of Artificial Sequence: Synthetic polynucleotide"
  source 1..1467: mol_type = other DNA
atggccctccctgtcaccgccctgctgcttccgctggctcttctgctccacgccgctcggccccaagtcaatctgcgcgaatccggccccgccttggtcaagcctacccagaccctcactctgacctgtactttctccggcttctccctgcggacttccgggatgtgcgtgtcctggatcagacagcctccgggaaaggccctggagtggctcgctcgcattgactgggatgaggacaagttctactccacctcactcaagaccaggctgaccatcagcaaagatacctctgacaaccaagtggtgctccgcatgaccaacatggacccagccgacactgccacttactactgcgcgaggagcggagcgggcggaacctccgccaccgccttcgatatttggggcccgggtaccatggtcaccgtgtcaagcggaggaggggggtccgggggcggcggttccgggggaggcggatcggacattcagatgactcagtcaccatcgtccctgagcgctagcgtgggcgacagagtgacaatcacttgccgggcatcccaggacatctataacaaccttgcgtggttccagctgaagcctggttccgcaccgcggtcacttatgtacgccgccaacaagagccagtcgggagtgccgtcccggttttccggttcggcctcgggaactgacttcaccctgacgatctccagcctgcaacccgaggatttcgccacctactactgccagcactactaccgctttccctactcgttcggacagggaaccaagctggaaatcaagaccactaccccagcaccgaggccacccaccccggctcctaccatcgcctcccagcctctgtccctgcgtccggaggcatgtagacccgcagctggtggggccgtgcatacccggggtcttgacttcgcctgcgatatctacatttgggcccctctggctggtacttgcggggtcctgctgctttcactcgtgatcactctttactgtaagcgcggtcggaagaagctgctgtacatctttaagcaacccttcatgaggcctgtgcagactactcaagaggaggacggctgttcatgccggttcccagaggaggaggaaggcggctgcgaactgcgcgtgaaattcagccgcagcgcagatgctccagcctacaagcaggggcagaaccagctctacaacgaactcaatcttggtcggagagaggagtacgacgtgctggacaagcggagaggacgggacccagaaatgggcgggaagccgcgcagaaagaatccccaagagggcctgtacaacgagctccaaaaggataagatggcagaagcctatagcgagattggtatgaaaggggaacgcagaagaggcaaaggccacgacggactgtaccagggactcagcaccgccaccaaggacacctatgacgctcttcacatgcaggccctgccgcctcgg

SEQ ID NO: 680 - protein, 246 aa, synthetic construct
  REGION 1..246: note = source = /note="Description of Artificial Sequence: Synthetic polypeptide"
EVQLVESGGGLVKPGGSLRLSCAASGFTFSSYSMNWVRQAPGKGLEWVSSISSSSSYIYYADSVKGRFTISRDNAKNSLYLQMNSLRAEDTAVYYCAKTIAAVYAFDIWGQGTTVTVSSGGGGSGGGGSGGGGSEIVLTQSPLSLPVTPEEPASISCRSSQSLLHSNGYNYLDWYLQKPGQSPQLLIYLGSNRASGVPDRFSGSGSGTDFTLKISRVEAEDVGVYYCMQALQTPYTFGQGTKLEIK

SEQ ID NO: 681 - DNA, 738 bp, synthetic construct
  misc_feature 1..738: note = source = /note="Description of Artificial Sequence: Synthetic polynucleotide"
  source 1..738: mol_type = other DNA
gaagtgcagcttgtcgaatccggggggggactggtcaagccgggcggatcactgagactgtcctgcgccgcgagcggcttcacgttctcctcctactccatgaactgggtccgccaagcccccgggaagggactggaatgggtgtcctctatctcctcgtcgtcgtcctacatctactacgccgactccgtgaagggaagattcaccatttcccgcgacaacgcaaagaactcactgtacttgcaaatgaactcactccgggccgaagatactgctgtgtactattgcgccaagactattgccgccgtctacgctttcgacatctggggccagggaaccaccgtgactgtgtcgtccggtggtggtggctcgggcggaggaggaagcggcggcggggggtccgagattgtgctgacccagtcgccactgagcctccctgtgacccccgaggaacccgccagcatcagctgccggtccagccagtccctgctccactccaacggatacaattacctcgattggtaccttcagaagcctggacaaagcccgcagctgctcatctacttgggatcaaaccgcgcgtcaggagtgcctgaccggttctccggctcgggcagcggtaccgatttcaccctgaaaatctccagggtggaggcagaggacgtgggagtgtattactgtatgcaggcgctgcagactccgtacacatttgggcagggcaccaagctggagatcaag

SEQ ID NO: 682 - protein, 119 aa, synthetic construct
  REGION 1..119: note = source = /note="Description of Artificial Sequence: Synthetic polypeptide"
EVQLVESGGGLVKPGGSLRLSCAASGFTFSSYSMNWVRQAPGKGLEWVSSISSSSSYIYYADSVKGRFTISRDNAKNSLYLQMNSLRAEDTAVYYCAKTIAAVYAFDIWGQGTTVTVSS

SEQ ID NO: 683 - protein, 112 aa, synthetic construct
  REGION 1..112: note = source = /note="Description of Artificial Sequence: Synthetic polypeptide"
EIVLTQSPLSLPVTPEEPASISCRSSQSLLHSNGYNYLDWYLQKPGQSPQLLIYLGSNRASGVPDRFSGSGSGTDFTLKISRVEAEDVGVYYCMQALQTPYTFGQGTKLEIK

SEQ ID NO: 684 - protein, 490 aa, synthetic construct
  REGION 1..490: note = source = /note="Description of Artificial Sequence: Synthetic polypeptide"
MALPVTALLLPLALLLHAARPEVQLVESGGGLVKPGGSLRLSCAASGFTFSSYSMNWVRQAPGKGLEWVSSISSSSSYIYYADSVKGRFTISRDNAKNSLYLQMNSLRAEDTAVYYCAKTIAAVYAFDIWGQGTTVTVSSGGGGSGGGGSGGGGSEIVLTQSPLSLPVTPEEPASISCRSSQSLLHSNGYNYLDWYLQKPGQSPQLLIYLGSNRASGVPDRFSGSGSGTDFTLKISRVEAEDVGVYYCMQALQTPYTFGQGTKLEIKTTTPAPRPPTPAPTIASQPLSLRPEACRPAAGGAVHTRGLDFACDIYIWAPLAGTCGVLLLSLVITLYCKRGRKKLLYIFKQPFMRPVQTTQEEDGCSCRFPEEEEGGCELRVKFSRSADAPAYKQGQNQLYNELNLGRREEYDVLDKRRGRDPEMGGKPRRKNPQEGLYNELQKDKMAEAYSEIGMKGERRRGKGHDGLYQGLSTATKDTYDALHMQALPPR

SEQ ID NO: 685 - DNA, 1470 bp, synthetic construct
  misc_feature 1..1470: note = source = /note="Description of Artificial Sequence: Synthetic polynucleotide"
  source 1..1470: mol_type = other DNA
atggccctccctgtcaccgccctgctgcttccgctggctcttctgctccacgccgctcggcccgaagtgcagcttgtcgaatccggggggggactggtcaagccgggcggatcactgagactgtcctgcgccgcgagcggcttcacgttctcctcctactccatgaactgggtccgccaagcccccgggaagggactggaatgggtgtcctctatctcctcgtcgtcgtcctacatctactacgccgactccgtgaagggaagattcaccatttcccgcgacaacgcaaagaactcactgtacttgcaaatgaactcactccgggccgaagatactgctgtgtactattgcgccaagactattgccgccgtctacgctttcgacatctggggccagggaaccaccgtgactgtgtcgtccggtggtggtggctcgggcggaggaggaagcggcggcggggggtccgagattgtgctgacccagtcgccactgagcctccctgtgacccccgaggaacccgccagcatcagctgccggtccagccagtccctgctccactccaacggatacaattacctcgattggtaccttcagaagcctggacaaagcccgcagctgctcatctacttgggatcaaaccgcgcgtcaggagtgcctgaccggttctccggctcgggcagcggtaccgatttcaccctgaaaatctccagggtggaggcagaggacgtgggagtgtattactgtatgcaggcgctgcagactccgtacacatttgggcagggcaccaagctggagatcaagaccactaccccagcaccgaggccacccaccccggctcctaccatcgcctcccagcctctgtccctgcgtccggaggcatgtagacccgcagctggtggggccgtgcatacccggggtcttgacttcgcctgcgatatctacatttgggcccctctggctggtacttgcggggtcctgctgctttcactcgtgatcactctttactgtaagcgcggtcggaagaagctgctgtacatctttaagcaacccttcatgaggcctgtgcagactactcaagaggaggacggctgttcatgccggttcccagaggaggaggaaggcggctgcgaactgcgcgtgaaattcagccgcagcgcagatgctccagcctacaagcaggggcagaaccagctctacaacgaactcaatcttggtcggagagaggagtacgacgtgctggacaagcggagaggacgggacccagaaatgggcgggaagccgcgcagaaagaatccccaagagggcctgtacaacgagctccaaaaggataagatggcagaagcctatagcgagattggtatgaaaggggaacgcagaagaggcaaaggccacgacggactgtaccagggactcagcaccgccaccaaggacacctatgacgctcttcacatgcaggccctgccgcctcgg

SEQ ID NO: 686 - protein, 240 aa, synthetic construct
  REGION 1..240: note = source = /note="Description of Artificial Sequence: Synthetic polypeptide"
EVQLVESGGGLVKPGGSLRLSCAASGFTFSDYYMSWIRQAPGKGLEWVSYISSSGSTIYYADSVKGRFTISRDNAKNSLYLQMNSLRAEDTAVYYCARDLRGAFDIWGQGTMVTVSSGGGGSGGGGSGGGGSSYVLTQSPSVSAAPGYTATISCGGNNIGTKSVHWYQQKPGQAPLLVIRDDSVRPSKIPGRFSGSNSGNMATLTISGVQAGDEADFYCQVWDSDSEHVVFGGGTKLTVL

SEQ ID NO: 687 - DNA, 720 bp, synthetic construct
  misc_feature 1..720: note = source = /note="Description of Artificial Sequence: Synthetic polynucleotide"
  source 1..720: mol_type = other DNA
gaagtccagctcgtggagtccggcggaggccttgtgaagcctggaggttcgctgagactgtcctgcgccgcctccggcttcaccttctccgactactacatgtcctggatcagacaggccccgggaaagggcctggaatgggtgtcctacatctcgtcatcgggcagcactatctactacgcggactcagtgaaggggcggttcaccatttcccgggataacgcgaagaactcgctgtatctgcaaatgaactcactgagggccgaggacaccgccgtgtactactgcgcccgcgatctccgcggggcatttgacatctggggacagggaaccatggtcacagtgtccagcggagggggaggatcgggtggcggaggttccgggggtggaggctcctcctacgtgctgactcagagcccaagcgtcagcgctgcgcccggttacacggcaaccatctcctgtggcggaaacaacattgggaccaagtctgtgcactggtatcagcagaagccgggccaagctcccctgttggtgatccgcgatgactccgtgcggcctagcaaaattccgggacggttctccggctccaacagcggcaatatggccactctcaccatctcgggagtgcaggccggagatgaagccgacttctactgccaagtctgggactcagactccgagcatgtggtgttcgggggcggaaccaagctgactgtgctc

SEQ ID NO: 688 - protein, 117 aa, synthetic construct
  REGION 1..117: note = source = /note="Description of Artificial Sequence: Synthetic polypeptide"
EVQLVESGGGLVKPGGSLRLSCAASGFTFSDYYMSWIRQAPGKGLEWVSYISSSGSTIYYADSVKGRFTISRDNAKNSLYLQMNSLRAEDTAVYYCARDLRGAFDIWGQGTMVTVSS

SEQ ID NO: 689 - protein, 108 aa, synthetic construct
  REGION 1..108: note = source = /note="Description of Artificial Sequence: Synthetic polypeptide"
SYVLTQSPSVSAAPGYTATISCGGNNIGTKSVHWYQQKPGQAPLLVIRDDSVRPSKIPGRFSGSNSGNMATLTISGVQAGDEADFYCQVWDSDSEHVVFGGGTKLTVL

SEQ ID NO: 690 - protein, 484 aa, synthetic construct
  REGION 1..484: note = source = /note="Description of Artificial Sequence: Synthetic polypeptide"
MALPVTALLLPLALLLHAARPEVQLVESGGGLVKPGGSLRLSCAASGFTFSDYYMSWIRQAPGKGLEWVSYISSSGSTIYYADSVKGRFTISRDNAKNSLYLQMNSLRAEDTAVYYCARDLRGAFDIWGQGTMVTVSSGGGGSGGGGSGGGGSSYVLTQSPSVSAAPGYTATISCGGNNIGTKSVHWYQQKPGQAPLLVIRDDSVRPSKIPGRFSGSNSGNMATLTISGVQAGDEADFYCQVWDSDSEHVVFGGGTKLTVLTTTPAPRPPTPAPTIASQPLSLRPEACRPAAGGAVHTRGLDFACDIYIWAPLAGTCGVLLLSLVITLYCKRGRKKLLYIFKQPFMRPVQTTQEEDGCSCRFPEEEEGGCELRVKFSRSADAPAYKQGQNQLYNELNLGRREEYDVLDKRRGRDPEMGGKPRRKNPQEGLYNELQKDKMAEAYSEIGMKGERRRGKGHDGLYQGLSTATKDTYDALHMQALPPR

SEQ ID NO: 691 - DNA, 1452 bp, synthetic construct
  misc_feature 1..1452: note = source = /note="Description of Artificial Sequence: Synthetic polynucleotide"
  source 1..1452: mol_type = other DNA
atggccctccctgtcaccgccctgctgcttccgctggctcttctgctccacgccgctcggcccgaagtccagctcgtggagtccggcggaggccttgtgaagcctggaggttcgctgagactgtcctgcgccgcctccggcttcaccttctccgactactacatgtcctggatcagacaggccccgggaaagggcctggaatgggtgtcctacatctcgtcatcgggcagcactatctactacgcggactcagtgaaggggcggttcaccatttcccgggataacgcgaagaactcgctgtatctgcaaatgaactcactgagggccgaggacaccgccgtgtactactgcgcccgcgatctccgcggggcatttgacatctggggacagggaaccatggtcacagtgtccagcggagggggaggatcgggtggcggaggttccgggggtggaggctcctcctacgtgctgactcagagcccaagcgtcagcgctgcgcccggttacacggcaaccatctcctgtggcggaaacaacattgggaccaagtctgtgcactggtatcagcagaagccgggccaagctcccctgttggtgatccgcgatgactccgtgcggcctagcaaaattccgggacggttctccggctccaacagcggcaatatggccactctcaccatctcgggagtgcaggccggagatgaagccgacttctactgccaagtctgggactcagactccgagcatgtggtgttcgggggcggaaccaagctgactgtgctcaccactaccccagcaccgaggccacccaccccggctcctaccatcgcctcccagcctctgtccctgcgtccggaggcatgtagacccgcagctggtggggccgtgcatacccggggtcttgacttcgcctgcgatatctacatttgggcccctctggctggtacttgcggggtcctgctgctttcactcgtgatcactctttactgtaagcgcggtcggaagaagctgctgtacatctttaagcaacccttcatgaggcctgtgcagactactcaagaggaggacggctgttcatgccggttcccagaggaggaggaaggcggctgcgaactgcgcgtgaaattcagccgcagcgcagatgctccagcctacaagcaggggcagaaccagctctacaacgaactcaatcttggtcggagagaggagtacgacgtgctggacaagcggagaggacgggacccagaaatgggcgggaagccgcgcagaaagaatccccaagagggcctgtacaacgagctccaaaaggataagatggcagaagcctatagcgagattggtatgaaaggggaacgcagaagaggcaaaggccacgacggactgtaccagggactcagcaccgccaccaaggacacctatgacgctcttcacatgcaggccctgccgcctcgg

SEQ ID NO: 692 - protein, 241 aa, synthetic construct
  REGION 1..241: note = source = /note="Description of Artificial Sequence: Synthetic polypeptide"
QVQLVQSGAEVKKPGASVKVSCKPSGYTVTSHYIHWVRRAPGQGLEWMGMINPSGGVTAYSQTLQGRVTMTSDTSSSTVYMELSSLRSEDTAMYYCAREGSGSGWYFDFWGRGTLVTVSSGGGGSGGGGSGGGGSSYVLTQPPSVSVSPGQTASITCSGDGLSKKYVSWYQQKAGQSPVVLISRDKERPSGIPDRFSGSNSADTATLTISGTQAMDEADYYCQAWDDTTVVFGGGTKLTVL

SEQ ID NO: 693 - DNA, 723 bp, synthetic construct
  misc_feature 1..723: note = source = /note="Description of Artificial Sequence: Synthetic polynucleotide"
  source 1..723: mol_type = other DNA
caagtgcagctggtgcagagcggggccgaagtcaagaagccgggagcctccgtgaaagtgtcctgcaagccttcgggatacaccgtgacctcccactacattcattgggtccgccgcgcccccggccaaggactcgagtggatgggcatgatcaaccctagcggcggagtgaccgcgtacagccagacgctgcagggacgcgtgactatgacctcggatacctcctcctccaccgtctatatggaactgtccagcctgcggtccgaggataccgccatgtactactgcgcccgggaaggatcaggctccgggtggtatttcgacttctggggaagaggcaccctcgtgactgtgtcatctgggggagggggttccggtggtggcggatcgggaggaggcggttcatcctacgtgctgacccagccaccctccgtgtccgtgagccccggccagactgcatcgattacatgtagcggcgacggcctctccaagaaatacgtgtcgtggtaccagcagaaggccggacagagcccggtggtgctgatctcaagagataaggagcggcctagcggaatcccggacaggttctcgggttccaactccgcggacactgctactctgaccatctcggggacccaggctatggacgaagccgattactactgccaagcctgggacgacactactgtcgtgtttggagggggcaccaagttgaccgtcctt

SEQ ID NO: 694 - protein, 120 aa, synthetic construct
  REGION 1..120: note = source = /note="Description of Artificial Sequence: Synthetic polypeptide"
QVQLVQSGAEVKKPGASVKVSCKPSGYTVTSHYIHWVRRAPGQGLEWMGMINPSGGVTAYSQTLQGRVTMTSDTSSSTVYMELSSLRSEDTAMYYCAREGSGSGWYFDFWGRGTLVTVSS

SEQ ID NO: 695 - protein, 106 aa, synthetic construct
  REGION 1..106: note = source = /note="Description of Artificial Sequence: Synthetic polypeptide"
SYVLTQPPSVSVSPGQTASITCSGDGLSKKYVSWYQQKAGQSPVVLISRDKERPSGIPDRFSGSNSADTATLTISGTQAMDEADYYCQAWDDTTVVFGGGTKLTVL

SEQ ID NO: 696 - protein, 485 aa, synthetic construct
  REGION 1..485: note = source = /note="Description of Artificial Sequence: Synthetic polypeptide"
MALPVTALLLPLALLLHAARPQVQLVQSGAEVKKPGASVKVSCKPSGYTVTSHYIHWVRRAPGQGLEWMGMINPSGGVTAYSQTLQGRVTMTSDTSSSTVYMELSSLRSEDTAMYYCAREGSGSGWYFDFWGRGTLVTVSSGGGGSGGGGSGGGGSSYVLTQPPSVSVSPGQTASITCSGDGLSKKYVSWYQQKAGQSPVVLISRDKERPSGIPDRFSGSNSADTATLTISGTQAMDEADYYCQAWDDTTVVFGGGTKLTVLTTTPAPRPPTPAPTIASQPLSLRPEACRPAAGGAVHTRGLDFACDIYIWAPLAGTCGVLLLSLVITLYCKRGRKKLLYIFKQPFMRPVQTTQEEDGCSCRFPEEEEGGCELRVKFSRSADAPAYKQGQNQLYNELNLGRREEYDVLDKRRGRDPEMGGKPRRKNPQEGLYNELQKDKMAEAYSEIGMKGERRRGKGHDGLYQGLSTATKDTYDALHMQALPPR

SEQ ID NO: 697 - DNA, 1455 bp, synthetic construct
  misc_feature 1..1455: note = source = /note="Description of Artificial Sequence: Synthetic polynucleotide"
  source 1..1455: mol_type = other DNA
atggccctccctgtcaccgccctgctgcttccgctggctcttctgctccacgccgctcggccccaagtgcagctggtgcagagcggggccgaagtcaagaagccgggagcctccgtgaaagtgtcctgcaagccttcgggatacaccgtgacctcccactacattcattgggtccgccgcgcccccggccaaggactcgagtggatgggcatgatcaaccctagcggcggagtgaccgcgtacagccagacgctgcagggacgcgtgactatgacctcggatacctcctcctccaccgtctatatggaactgtccagcctgcggtccgaggataccgccatgtactactgcgcccgggaaggatcaggctccgggtggtatttcgacttctggggaagaggcaccctcgtgactgtgtcatctgggggagggggttccggtggtggcggatcgggaggaggcggttcatcctacgtgctgacccagccaccctccgtgtccgtgagccccggccagactgcatcgattacatgtagcggcgacggcctctccaagaaatacgtgtcgtggtaccagcagaaggccggacagagcccggtggtgctgatctcaagagataaggagcggcctagcggaatcccggacaggttctcgggttccaactccgcggacactgctactctgaccatctcggggacccaggctatggacgaagccgattactactgccaagcctgggacgacactactgtcgtgtttggagggggcaccaagttgaccgtccttaccactaccccagcaccgaggccacccaccccggctcctaccatcgcctcccagcctctgtccctgcgtccggaggcatgtagacccgcagctggtggggccgtgcatacccggggtcttgacttcgcctgcgatatctacatttgggcccctctggctggtacttgcggggtcctgctgctttcactcgtgatcactctttactgtaagcgcggtcggaagaagctgctgtacatctttaagcaacccttcatgaggcctgtgcagactactcaagaggaggacggctgttcatgccggttcccagaggaggaggaaggcggctgcgaactgcgcgtgaaattcagccgcagcgcagatgctccagcctacaagcaggggcagaaccagctctacaacgaactcaatcttggtcggagagaggagtacgacgtgctggacaagcggagaggacgggacccagaaatgggcgggaagccgcgcagaaagaatccccaagagggcctgtacaacgagctccaaaaggataagatggcagaagcctatagcgagattggtatgaaaggggaacgcagaagaggcaaaggccacgacggactgtaccagggactcagcaccgccaccaaggacacctatgacgctcttcacatgcaggccctgccgcctcgg

SEQ ID NO: 698 - protein, 245 aa, synthetic construct
  REGION 1..245: note = source = /note="Description of Artificial Sequence: Synthetic polypeptide"
QVQLQESGPGLVKPSQTLSLTCTVSGGSISSGGYYWSWIRQHPGKGLEWIGYIYYSGSTYYNPSLKSRVTISVDTSKNQFSLKLSSVTAADTAVYYCARAGIAARLRGAFDIWGQGTMVTVSSGGGGSGGGGSGGGGSDIVMTQSPSSVSASVGDRVIITCRASQGIRNWLAWYQQKPGKAPNLLIYAASNLQSGVPSRFSGSGSGADFTLTISSLQPEDVATYYCQKYNSAPFTFGPGTKVDIK

SEQ ID NO: 699 - DNA, 735 bp, synthetic construct
  misc_feature 1..735: note = source = /note="Description of Artificial Sequence: Synthetic polynucleotide"
  source 1..735: mol_type = other DNA
caagtgcagcttcaggagagcggcccgggactcgtgaagccgtcccagaccctgtccctgacttgcaccgtgtcgggaggaagcatctcgagcggaggctactattggtcgtggattcggcagcaccctggaaagggcctggaatggatcggctacatctactactccggctcgacctactacaacccatcgctgaagtccagagtgacaatctcagtggacacgtccaagaatcagttcagcctgaagctctcttccgtgactgcggccgacaccgccgtgtactactgcgcacgcgctggaattgccgcccggctgaggggtgccttcgacatttggggacagggcaccatggtcaccgtgtcctccggcggcggaggttccgggggtggaggctcaggaggaggggggtccgacatcgtcatgactcagtcgccctcaagcgtcagcgcgtccgtcggggacagagtgatcatcacctgtcgggcgtcccagggaattcgcaactggctggcctggtatcagcagaagcccggaaaggcccccaacctgttgatctacgccgcctcaaacctccaatccggggtgccgagccgcttcagcggctccggttcgggtgccgatttcactctgaccatctcctccctgcaacctgaagatgtggctacctactactgccaaaagtacaactccgcaccttttactttcggaccggggaccaaagtggacattaag

SEQ ID NO: 700 - protein, 123 aa, synthetic construct
  REGION 1..123: note = source = /note="Description of Artificial Sequence: Synthetic polypeptide"
QVQLQESGPGLVKPSQTLSLTCTVSGGSISSGGYYWSWIRQHPGKGLEWIGYIYYSGSTYYNPSLKSRVTISVDTSKNQFSLKLSSVTAADTAVYYCARAGIAARLRGAFDIWGQGTMVTVSS

SEQ ID NO: 701 - protein, 107 aa, synthetic construct
  REGION 1..107: note = source = /note="Description of Artificial Sequence: Synthetic polypeptide"
DIVMTQSPSSVSASVGDRVIITCRASQGIRNWLAWYQQKPGKAPNLLIYAASNLQSGVPSRFSGSGSGADFTLTISSLQPEDVATYYCQKYNSAPFTFGPGTKVDIK

SEQ ID NO: 702 - protein, 489 aa, synthetic construct
  REGION 1..489: note = source = /note="Description of Artificial Sequence: Synthetic polypeptide"
MALPVTALLLPLALLLHAARPQVQLQESGPGLVKPSQTLSLTCTVSGGSISSGGYYWSWIRQHPGKGLEWIGYIYYSGSTYYNPSLKSRVTISVDTSKNQFSLKLSSVTAADTAVYYCARAGIAARLRGAFDIWGQGTMVTVSSGGGGSGGGGSGGGGSDIVMTQSPSSVSASVGDRVIITCRASQGIRNWLAWYQQKPGKAPNLLIYAASNLQSGVPSRFSGSGSGADFTLTISSLQPEDVATYYCQKYNSAPFTFGPGTKVDIKTTTPAPRPPTPAPTIASQPLSLRPEACRPAAGGAVHTRGLDFACDIYIWAPLAGTCGVLLLSLVITLYCKRGRKKLLYIFKQPFMRPVQTTQEEDGCSCRFPEEEEGGCELRVKFSRSADAPAYKQGQNQLYNELNLGRREEYDVLDKRRGRDPEMGGKPRRKNPQEGLYNELQKDKMAEAYSEIGMKGERRRGKGHDGLYQGLSTATKDTYDALHMQALPPR

SEQ ID NO: 703 - DNA, 1467 bp, synthetic construct
  misc_feature 1..1467: note = source = /note="Description of Artificial Sequence: Synthetic polynucleotide"
  source 1..1467: mol_type = other DNA
atggccctccctgtcaccgccctgctgcttccgctggctcttctgctccacgccgctcggccccaagtgcagcttcaggagagcggcccgggactcgtgaagccgtcccagaccctgtccctgacttgcaccgtgtcgggaggaagcatctcgagcggaggctactattggtcgtggattcggcagcaccctggaaagggcctggaatggatcggctacatctactactccggctcgacctactacaacccatcgctgaagtccagagtgacaatctcagtggacacgtccaagaatcagttcagcctgaagctctcttccgtgactgcggccgacaccgccgtgtactactgcgcacgcgctggaattgccgcccggctgaggggtgccttcgacatttggggacagggcaccatggtcaccgtgtcctccggcggcggaggttccgggggtggaggctcaggaggaggggggtccgacatcgtcatgactcagtcgccctcaagcgtcagcgcgtccgtcggggacagagtgatcatcacctgtcgggcgtcccagggaattcgcaactggctggcctggtatcagcagaagcccggaaaggcccccaacctgttgatctacgccgcctcaaacctccaatccggggtgccgagccgcttcagcggctccggttcgggtgccgatttcactctgaccatctcctccctgcaacctgaagatgtggctacctactactgccaaaagtacaactccgcaccttttactttcggaccggggaccaaagtggacattaagaccactaccccagcaccgaggccacccaccccggctcctaccatcgcctcccagcctctgtccctgcgtccggaggcatgtagacccgcagctggtggggccgtgcatacccggggtcttgacttcgcctgcgatatctacatttgggcccctctggctggtacttgcggggtcctgctgctttcactcgtgatcactctttactgtaagcgcggtcggaagaagctgctgtacatctttaagcaacccttcatgaggcctgtgcagactactcaagaggaggacggctgttcatgccggttcccagaggaggaggaaggcggctgcgaactgcgcgtgaaattcagccgcagcgcagatgctccagcctacaagcaggggcagaaccagctctacaacgaactcaatcttggtcggagagaggagtacgacgtgctggacaagcggagaggacgggacccagaaatgggcgggaagccgcgcagaaagaatccccaagagggcctgtacaacgagctccaaaaggataagatggcagaagcctatagcgagattggtatgaaaggggaacgcagaagaggcaaaggccacgacggactgtaccagggactcagcaccgccaccaaggacacctatgacgctcttcacatgcaggccctgccgcctcgg

SEQ ID NO: 704 - protein, 253 aa, synthetic construct
  REGION 1..253: note = source = /note="Description of Artificial Sequence: Synthetic polypeptide"
QVQLVQSGAEVKKPGSSVKVSCKASGGTFSSYAISWVRQAPGQGLEWMGGIIPIFGTANYAQKFQGRVTITADESTSTAYMELSSLRSEDTAVYYCARRGGYQLLRWDVGLLRSAFDIWGQGTMVTVSSGGGGSGGGGSGGGGSSYVLTQPPSVSVAPGQTARITCGGNNIGSKSVHWYQQKPGQAPVLVLYGKNNRPSGVPDRFSGSRSGTTASLTITGAQAEDEADYYCSSRDSSGDHLRVFGTGTKVTVL

SEQ ID NO: 705 - DNA, 759 bp, synthetic construct
  misc_feature 1..759: note = source = /note="Description of Artificial Sequence: Synthetic polynucleotide"
  source 1..759: mol_type = other DNA
caagtgcagctggtccagtcgggcgccgaggtcaagaagcccgggagctctgtgaaagtgtcctgcaaggcctccgggggcacctttagctcctacgccatctcctgggtccgccaagcaccgggtcaaggcctggagtggatggggggaattatccctatcttcggcactgccaactacgcccagaagttccagggacgcgtgaccattaccgcggacgaatccacctccaccgcttatatggagctgtccagcttgcgctcggaagataccgccgtgtactactgcgcccggaggggtggataccagctgctgagatgggacgtgggcctcctgcggtcggcgttcgacatctggggccagggcactatggtcactgtgtccagcggaggaggcggatcgggaggcggcggatcagggggaggcggttccagctacgtgcttactcaacccccttcggtgtccgtggccccgggacagaccgccagaatcacttgcggaggaaacaacattgggtccaagagcgtgcattggtaccagcagaagccaggacaggcccctgtgctggtgctctacgggaagaacaatcggcccagcggagtgccggacaggttctcgggttcacgctccggtacaaccgcttcactgactatcaccggggcccaggcagaggatgaagcggactactactgttcctcccgggattcatccggcgaccacctccgggtgttcggaaccggaacgaaggtcaccgtgctg

SEQ ID NO: 706 - protein, 129 aa, synthetic construct
  REGION 1..129: note = source = /note="Description of Artificial Sequence: Synthetic polypeptide"
QVQLVQSGAEVKKPGSSVKVSCKASGGTFSSYAISWVRQAPGQGLEWMGGIIPIFGTANYAQKFQGRVTITADESTSTAYMELSSLRSEDTAVYYCARRGGYQLLRWDVGLLRSAFDIWGQGTMVTVSS

SEQ ID NO: 707 - protein, 109 aa, synthetic construct
  REGION 1..109: note = source = /note="Description of Artificial Sequence: Synthetic polypeptide"
SYVLTQPPSVSVAPGQTARITCGGNNIGSKSVHWYQQKPGQAPVLVLYGKNNRPSGVPDRFSGSRSGTTASLTITGAQAEDEADYYCSSRDSSGDHLRVFGTGTKVTVL

SEQ ID NO: 708 - protein, 497 aa, synthetic construct
  REGION 1..497: note = source = /note="Description of Artificial Sequence: Synthetic polypeptide"
MALPVTALLLPLALLLHAARPQVQLVQSGAEVKKPGSSVKVSCKASGGTFSSYAISWVRQAPGQGLEWMGGIIPIFGTANYAQKFQGRVTITADESTSTAYMELSSLRSEDTAVYYCARRGGYQLLRWDVGLLRSAFDIWGQGTMVTVSSGGGGSGGGGSGGGGSSYVLTQPPSVSVAPGQTARITCGGNNIGSKSVHWYQQKPGQAPVLVLYGKNNRPSGVPDRFSGSRSGTTASLTITGAQAEDEADYYCSSRDSSGDHLRVFGTGTKVTVLTTTPAPRPPTPAPTIASQPLSLRPEACRPAAGGAVHTRGLDFACDIYIWAPLAGTCGVLLLSLVITLYCKRGRKKLLYIFKQPFMRPVQTTQEEDGCSCRFPEEEEGGCELRVKFSRSADAPAYKQGQNQLYNELNLGRREEYDVLDKRRGRDPEMGGKPRRKNPQEGLYNELQKDKMAEAYSEIGMKGERRRGKGHDGLYQGLSTATKDTYDALHMQALPPR

SEQ ID NO: 709 - DNA, 1491 bp, synthetic construct
  misc_feature 1..1491: note = source = /note="Description of Artificial Sequence: Synthetic polynucleotide"
  source 1..1491: mol_type = other DNA
atggccctccctgtcaccgccctgctgcttccgctggctcttctgctccacgccgctcggccccaagtgcagctggtccagtcgggcgccgaggtcaagaagcccgggagctctgtgaaagtgtcctgcaaggcctccgggggcacctttagctcctacgccatctcctgggtccgccaagcaccgggtcaaggcctggagtggatggggggaattatccctatcttcggcactgccaactacgcccagaagttccagggacgcgtgaccattaccgcggacgaatccacctccaccgcttatatggagctgtccagcttgcgctcggaagataccgccgtgtactactgcgcccggaggggtggataccagctgctgagatgggacgtgggcctcctgcggtcggcgttcgacatctggggccagggcactatggtcactgtgtccagcggaggaggcggatcgggaggcggcggatcagggggaggcggttccagctacgtgcttactcaacccccttcggtgtccgtggccccgggacagaccgccagaatcacttgcggaggaaacaacattgggtccaagagcgtgcattggtaccagcagaagccaggacaggcccctgtgctggtgctctacgggaagaacaatcggcccagcggagtgccggacaggttctcgggttcacgctccggtacaaccgcttcactgactatcaccggggcccaggcagaggatgaagcggactactactgttcctcccgggattcatccggcgaccacctccgggtgttcggaaccggaacgaaggtcaccgtgctgaccactaccccagcaccgaggccacccaccccggctcctaccatcgcctcccagcctctgtccctgcgtccggaggcatgtagacccgcagctggtggggccgtgcatacccggggtcttgacttcgcctgcgatatctacatttgggcccctctggctggtacttgcggggtcctgctgctttcactcgtgatcactctttactgtaagcgcggtcggaagaagctgctgtacatctttaagcaacccttcatgaggcctgtgcagactactcaagaggaggacggctgttcatgccggttcccagaggaggaggaaggcggctgcgaactgcgcgtgaaattcagccgcagcgcagatgctccagcctacaagcaggggcagaaccagctctacaacgaactcaatcttggtcggagagaggagtacgacgtgctggacaagcggagaggacgggacccagaaatgggcgggaagccgcgcagaaagaatccccaagagggcctgtacaacgagctccaaaaggataagatggcagaagcctatagcgagattggtatgaaaggggaacgcagaagaggcaaaggccacgacggactgtaccagggactcagcaccgccaccaaggacacctatgacgctcttcacatgcaggccctgccgcctcgg

SEQ ID NO: 710 - protein, 248 aa, synthetic construct
  REGION 1..248: note = source = /note="Description of Artificial Sequence: Synthetic polypeptide"
EVQLQQSGPGLVKPSQTLSLTCAISGDSVSSNSAAWNWIRQSPSRGLEWLGRTYYRSKWYSFYAISLKSRIIINPDTSKNQFSLQLKSVTPEDTAVYYCARSSPEGLFLYWFDPWGQGTLVTVSSGGDGSGGGGSGGGGSSSELTQDPAVSVALGQTIRITCQGDSLGNYYATWYQQKPGQAPVLVIYGTNNRPSGIPDRFSASSSGNTASLTITGAQAEDEADYYCNSRDSSGHHLLFGTGTKVTVL

SEQ ID NO: 711 - DNA, 744 bp, synthetic construct
  misc_feature 1..744: note = source = /note="Description of Artificial Sequence: Synthetic polynucleotide"
  source 1..744: mol_type = other DNA
gaagtgcagctccaacagtcaggaccggggctcgtgaagccatcccagaccctgtccctgacttgtgccatctcgggagatagcgtgtcatcgaactccgccgcctggaactggattcggcagagcccgtcccgcggactggagtggcttggaaggacctactaccggtccaagtggtactctttctacgcgatctcgctgaagtcccgcattatcattaaccctgatacctccaagaatcagttctccctccaactgaaatccgtcacccccgaggacacagcagtgtattactgcgcacggagcagccccgaaggactgttcctgtattggtttgacccctggggccaggggactcttgtgaccgtgtcgagcggcggagatgggtccggtggcggtggttcggggggcggcggatcatcatccgaactgacccaggacccggctgtgtccgtggcgctgggacaaaccatccgcattacgtgccagggagactccctgggcaactactacgccacttggtaccagcagaagccgggccaagcccctgtgttggtcatctacgggaccaacaacagaccttccggcatccccgaccggttcagcgcttcgtcctccggcaacactgccagcctgaccatcactggagcgcaggccgaagatgaggccgactactactgcaacagcagagactcctcgggtcatcacctcttgttcggaactggaaccaaggtcaccgtgctg

SEQ ID NO: 712 - protein, 125 aa, synthetic construct
  REGION 1..125: note = source = /note="Description of Artificial Sequence: Synthetic polypeptide"
EVQLQQSGPGLVKPSQTLSLTCAISGDSVSSNSAAWNWIRQSPSRGLEWLGRTYYRSKWYSFYAISLKSRIIINPDTSKNQFSLQLKSVTPEDTAVYYCARSSPEGLFLYWFDPWGQGTLVTVSS

SEQ ID NO: 713 - protein, 108 aa, synthetic construct
  REGION 1..108: note = source = /note="Description of Artificial Sequence: Synthetic polypeptide"
SSELTQDPAVSVALGQTIRITCQGDSLGNYYATWYQQKPGQAPVLVIYGTNNRPSGIPDRFSASSSGNTASLTITGAQAEDEADYYCNSRDSSGHHLLFGTGTKVTVL

SEQ ID NO: 714 - protein, 492 aa, synthetic construct
  REGION 1..492: note = source = /note="Description of Artificial Sequence: Synthetic polypeptide"
MALPVTALLLPLALLLHAARPEVQLQQSGPGLVKPSQTLSLTCAISGDSVSSNSAAWNWIRQSPSRGLEWLGRTYYRSKWYSFYAISLKSRIIINPDTSKNQFSLQLKSVTPEDTAVYYCARSSPEGLFLYWFDPWGQGTLVTVSSGGDGSGGGGSGGGGSSSELTQDPAVSVALGQTIRITCQGDSLGNYYATWYQQKPGQAPVLVIYGTNNRPSGIPDRFSASSSGNTASLTITGAQAEDEADYYCNSRDSSGHHLLFGTGTKVTVLTTTPAPRPPTPAPTIASQPLSLRPEACRPAAGGAVHTRGLDFACDIYIWAPLAGTCGVLLLSLVITLYCKRGRKKLLYIFKQPFMRPVQTTQEEDGCSCRFPEEEEGGCELRVKFSRSADAPAYKQGQNQLYNELNLGRREEYDVLDKRRGRDPEMGGKPRRKNPQEGLYNELQKDKMAEAYSEIGMKGERRRGKGHDGLYQGLSTATKDTYDALHMQALPPR

SEQ ID NO: 715 - DNA, 1476 bp, synthetic construct
  misc_feature 1..1476: note = source = /note="Description of Artificial Sequence: Synthetic polynucleotide"
  source 1..1476: mol_type = other DNA
atggccctccctgtcaccgccctgctgcttccgctggctcttctgctccacgccgctcggcccgaagtgcagctccaacagtcaggaccggggctcgtgaagccatcccagaccctgtccctgacttgtgccatctcgggagatagcgtgtcatcgaactccgccgcctggaactggattcggcagagcccgtcccgcggactggagtggcttggaaggacctactaccggtccaagtggtactctttctacgcgatctcgctgaagtcccgcattatcattaaccctgatacctccaagaatcagttctccctccaactgaaatccgtcacccccgaggacacagcagtgtattactgcgcacggagcagccccgaaggactgttcctgtattggtttgacccctggggccaggggactcttgtgaccgtgtcgagcggcggagatgggtccggtggcggtggttcggggggcggcggatcatcatccgaactgacccaggacccggctgtgtccgtggcgctgggacaaaccatccgcattacgtgccagggagactccctgggcaactactacgccacttggtaccagcagaagccgggccaagcccctgtgttggtcatctacgggaccaacaacagaccttccggcatccccgaccggttcagcgcttcgtcctccggcaacactgccagcctgaccatcactggagcgcaggccgaagatgaggccgactactactgcaacagcagagactcctcgggtcatcacctcttgttcggaactggaaccaaggtcaccgtgctgaccactaccccagcaccgaggccacccaccccggctcctaccatcgcctcccagcctctgtccctgcgtccggaggcatgtagacccgcagctggtggggccgtgcatacccggggtcttgacttcgcctgcgatatctacatttgggcccctctggctggtacttgcggggtcctgctgctttcactcgtgatcactctttactgtaagcgcggtcggaagaagctgctgtacatctttaagcaacccttcatgaggcctgtgcagactactcaagaggaggacggctgttcatgccggttcccagaggaggaggaaggcggctgcgaactgcgcgtgaaattcagccgcagcgcagatgctccagcctacaagcaggggcagaaccagctctacaacgaactcaatcttggtcggagagaggagtacgacgtgctggacaagcggagaggacgggacccagaaatgggcgggaagccgcgcagaaagaatccccaagagggcctgtacaacgagctccaaaaggataagatggcagaagcctatagcgagattggtatgaaaggggaacgcagaagaggcaaaggccacgacggactgtaccagggactcagcaccgccaccaaggacacctatgacgctcttcacatgcaggccctgccgcctcgg

SEQ ID NO: 716 - protein, 246 aa, synthetic construct
  REGION 1..246: note = source = /note="Description of Artificial Sequence: Synthetic polypeptide"
EVQLVESGGGLVQPGGSLRLSCAASGFTFSSYAMSWVRQAPGKGLEWVSAISGSGGSTYYADSVKGRFTISRDNSKNTLYLQMNSLRAEDTAVYYCAKVEGSGSLDYWGQGTLVTVSSGGGGSGGGGSGGGGSEIVMTQSPGTLSLSPGERATLSCRASQSVSSAYLAWYQQKPGQPPRLLISGASTRATGIPDRFGGSGSGTDFTLTISRLEPEDFAVYYCQHYGSSFNGSSLFTFGQGTRLEIK

SEQ ID NO: 717 - DNA, 738 bp, synthetic construct
  misc_feature 1..738: note = source = /note="Description of Artificial Sequence: Synthetic polynucleotide"
  source 1..738: mol_type = other DNA
gaagtgcagctcgtggagtcaggaggcggcctggtccagccgggagggtcccttagactgtcatgcgccgcaagcggattcactttctcctcctatgccatgagctgggtccgccaagcccccggaaagggactggaatgggtgtccgccatctcggggtctggaggctcaacttactacgctgactccgtgaagggacggttcaccattagccgcgacaactccaagaacaccctctacctccaaatgaactccctgcgggccgaggataccgccgtctactactgcgccaaagtggaaggttcaggatcgctggactactggggacagggtactctcgtgaccgtgtcatcgggcggaggaggttccggcggtggcggctccggcggcggagggtcggagatcgtgatgacccagagccctggtactctgagcctttcgccgggagaaagggccaccctgtcctgccgcgcttcccaatccgtgtcctccgcgtacttggcgtggtaccagcagaagccgggacagccccctcggctgctgatcagcggggccagcacccgggcaaccggaatcccagacagattcgggggttccggcagcggcacagatttcaccctgactatttcgaggttggagcccgaggactttgcggtgtattactgtcagcactacgggtcgtcctttaatggctccagcctgttcacgttcggacaggggacccgcctggaaatcaag

SEQ ID NO: 718 - protein, 118 aa, synthetic construct
  REGION 1..118: note = source = /note="Description of Artificial Sequence: Synthetic polypeptide"
EVQLVESGGGLVQPGGSLRLSCAASGFTFSSYAMSWVRQAPGKGLEWVSAISGSGGSTYYADSVKGRFTISRDNSKNTLYLQMNSLRAEDTAVYYCAKVEGSGSLDYWGQGTLVTVSS

SEQ ID NO: 719 - protein, 113 aa, synthetic construct
  REGION 1..113: note = source = /note="Description of Artificial Sequence: Synthetic polypeptide"
EIVMTQSPGTLSLSPGERATLSCRASQSVSSAYLAWYQQKPGQPPRLLISGASTRATGIPDRFGGSGSGTDFTLTISRLEPEDFAVYYCQHYGSSFNGSSLFTFGQGTRLEIK

SEQ ID NO: 720 - protein, 490 aa, synthetic construct
  REGION 1..490: note = source = /note="Description of Artificial Sequence: Synthetic polypeptide"
MALPVTALLLPLALLLHAARPEVQLVESGGGLVQPGGSLRLSCAASGFTFSSYAMSWVRQAPGKGLEWVSAISGSGGSTYYADSVKGRFTISRDNSKNTLYLQMNSLRAEDTAVYYCAKVEGSGSLDYWGQGTLVTVSSGGGGSGGGGSGGGGSEIVMTQSPGTLSLSPGERATLSCRASQSVSSAYLAWYQQKPGQPPRLLISGASTRATGIPDRFGGSGSGTDFTLTISRLEPEDFAVYYCQHYGSSFNGSSLFTFGQGTRLEIKTTTPAPRPPTPAPTIASQPLSLRPEACRPAAGGAVHTRGLDFACDIYIWAPLAGTCGVLLLSLVITLYCKRGRKKLLYIFKQPFMRPVQTTQEEDGCSCRFPEEEEGGCELRVKFSRSADAPAYKQGQNQLYNELNLGRREEYDVLDKRRGRDPEMGGKPRRKNPQEGLYNELQKDKMAEAYSEIGMKGERRRGKGHDGLYQGLSTATKDTYDALHMQALPPR

SEQ ID NO: 721 - DNA, 1470 bp, synthetic construct
  misc_feature 1..1470: note = source = /note="Description of Artificial Sequence: Synthetic polynucleotide"
  source 1..1470: mol_type = other DNA
atggccctccctgtcaccgccctgctgcttccgctggctcttctgctccacgccgctcggcccgaagtgcagctcgtggagtcaggaggcggcctggtccagccgggagggtcccttagactgtcatgcgccgcaagcggattcactttctcctcctatgccatgagctgggtccgccaagcccccggaaagggactggaatgggtgtccgccatctcggggtctggaggctcaacttactacgctgactccgtgaagggacggttcaccattagccgcgacaactccaagaacaccctctacctccaaatgaactccctgcgggccgaggataccgccgtctactactgcgccaaagtggaaggttcaggatcgctggactactggggacagggtactctcgtgaccgtgtcatcgggcggaggaggttccggcggtggcggctccggcggcggagggtcggagatcgtgatgacccagagccctggtactctgagcctttcgccgggagaaagggccaccctgtcctgccgcgcttcccaatccgtgtcctccgcgtacttggcgtggtaccagcagaagccgggacagccccctcggctgctgatcagcggggccagcacccgggcaaccggaatcccagacagattcgggggttccggcagcggcacagatttcaccctgactatttcgaggttggagcccgaggactttgcggtgtattactgtcagcactacgggtcgtcctttaatggctccagcctgttcacgttcggacaggggacccgcctggaaatcaagaccactaccccagcaccgaggccacccaccccggctcctaccatcgcctcccagcctctgtccctgcgtccggaggcatgtagacccgcagctggtggggccgtgcatacccggggtcttgacttcgcctgcgatatctacatttgggcccctctggctggtacttgcggggtcctgctgctttcactcgtgatcactctttactgtaagcgcggtcggaagaagctgctgtacatctttaagcaacccttcatgaggcctgtgcagactactcaagaggaggacggctgttcatgccggttcccagaggaggaggaaggcggctgcgaactgcgcgtgaaattcagccgcagcgcagatgctccagcctacaagcaggggcagaaccagctctacaacgaactcaatcttggtcggagagaggagtacgacgtgctggacaagcggagaggacgggacccagaaatgggcgggaagccgcgcagaaagaatccccaagagggcctgtacaacgagctccaaaaggataagatggcagaagcctatagcgagattggtatgaaaggggaacgcagaagaggcaaaggccacgacggactgtaccagggactcagcaccgccaccaaggacacctatgacgctcttcacatgcaggccctgccgcctcgg

SEQ ID NO: 722 - protein, 241 aa, synthetic construct
  REGION 1..241: note = source = /note="Description of Artificial Sequence: Synthetic polypeptide"
EVQLVETGGGLVQPGGSLRLSCAASGITFSRYPMSWVRQAPGKGLEWVSGISDSGVSTYYADSAKGRFTISRDNSKNTLFLQMSSLRDEDTAVYYCVTRAGSEASDIWGQGTMVTVSSGGGGSGGGGSGGGGSEIVLTQSPATLSLSPGERATLSCRASQSVSNSLAWYQQKPGQAPRLLIYDASSRATGIPDRFSGSGSGTDFTLTISRLEPEDFAIYYCQQFGTSSGLTFGGGTKLEIK

SEQ ID NO: 723 - DNA, 723 bp, synthetic construct
  misc_feature 1..723: note = source = /note="Description of Artificial Sequence: Synthetic polynucleotide"
  source 1..723: mol_type = other DNA
gaagtgcaactggtggaaaccggtggcggcctggtgcagcctggaggatcattgaggctgtcatgcgcggccagcggtattaccttctcccggtaccccatgtcctgggtcagacaggccccggggaaagggcttgaatgggtgtccgggatctcggactccggtgtcagcacttactacgccgactccgccaagggacgcttcaccatttcccgggacaactcgaagaacaccctgttcctccaaatgagctccctccgggacgaggatactgcagtgtactactgcgtgacccgcgccgggtccgaggcgtctgacatttggggacagggcactatggtcaccgtgtcgtccggcggagggggctcgggaggcggtggcagcggaggaggagggtccgagatcgtgctgacccaatccccggccaccctctcgctgagccctggagaaagggcaaccttgtcctgtcgcgcgagccagtccgtgagcaactccctggcctggtaccagcagaagcccggacaggctccgagacttctgatctacgacgcttcgagccgggccactggaatccccgaccgcttttcggggtccggctcaggaaccgatttcaccctgacaatctcacggctggagccagaggatttcgccatctattactgccagcagttcggtacttcctccggcctgactttcggaggcggcacgaagctcgaaatcaag

SEQ ID NO: 724 - protein, 118 aa, synthetic construct
  REGION 1..118: note = source = /note="Description of Artificial Sequence: Synthetic polypeptide"
EVQLVETGGGLVQPGGSLRLSCAASGITFSRYPMSWVRQAPGKGLEWVSGISDSGVSTYYADSAKGRFTISRDNSKNTLFLQMSSLRDEDTAVYYCVTRAGSEASDIWGQGTMVTVSS

SEQ ID NO: 725 - protein, 108 aa, synthetic construct
  REGION 1..108: note = source = /note="Description of Artificial Sequence: Synthetic polypeptide"
EIVLTQSPATLSLSPGERATLSCRASQSVSNSLAWYQQKPGQAPRLLIYDASSRATGIPDRFSGSGSGTDFTLTISRLEPEDFAIYYCQQFGTSSGLTFGGGTKLEIK

SEQ ID NO: 726 - protein, 485 aa, synthetic construct
  REGION 1..485: note = source = /note="Description of Artificial Sequence: Synthetic polypeptide"
MALPVTALLLPLALLLHAARPEVQLVETGGGLVQPGGSLRLSCAASGITFSRYPMSWVRQAPGKGLEWVSGISDSGVSTYYADSAKGRFTISRDNSKNTLFLQMSSLRDEDTAVYYCVTRAGSEASDIWGQGTMVTVSSGGGGSGGGGSGGGGSEIVLTQSPATLSLSPGERATLSCRASQSVSNSLAWYQQKPGQAPRLLIYDASSRATGIPDRFSGSGSGTDFTLTISRLEPEDFAIYYCQQFGTSSGLTFGGGTKLEIKTTTPAPRPPTPAPTIASQPLSLRPEACRPAAGGAVHTRGLDFACDIYIWAPLAGTCGVLLLSLVITLYCKRGRKKLLYIFKQPFMRPVQTTQEEDGCSCRFPEEEEGGCELRVKFSRSADAPAYKQGQNQLYNELNLGRREEYDVLDKRRGRDPEMGGKPRRKNPQEGLYNELQKDKMAEAYSEIGMKGERRRGKGHDGLYQGLSTATKDTYDALHMQALPPR

SEQ ID NO: 727 - DNA, 1455 bp, synthetic construct
  misc_feature 1..1455: note = source = /note="Description of Artificial Sequence: Synthetic polynucleotide"
  source 1..1455: mol_type = other DNA
atggccctccctgtcaccgccctgctgcttccgctggctcttctgctccacgccgctcggcccgaagtgcaactggtggaaaccggtggcggcctggtgcagcctggaggatcattgaggctgtcatgcgcggccagcggtattaccttctcccggtaccccatgtcctgggtcagacaggccccggggaaagggcttgaatgggtgtccgggatctcggactccggtgtcagcacttactacgccgactccgccaagggacgcttcaccatttcccgggacaactcgaagaacaccctgttcctccaaatgagctccctccgggacgaggatactgcagtgtactactgcgtgacccgcgccgggtccgaggcgtctgacatttggggacagggcactatggtcaccgtgtcgtccggcggagggggctcgggaggcggtggcagcggaggaggagggtccgagatcgtgctgacccaatccccggccaccctctcgctgagccctggagaaagggcaaccttgtcctgtcgcgcgagccagtccgtgagcaactccctggcctggtaccagcagaagcccggacaggctccgagacttctgatctacgacgcttcgagccgggccactggaatccccgaccgcttttcggggtccggctcaggaaccgatttcaccctgacaatctcacggctggagccagaggatttcgccatctattactgccagcagttcggtacttcctccggcctgactttcggaggcggcacgaagctcgaaatcaagaccactaccccagcaccgaggccacccaccccggctcctaccatcgcctcccagcctctgtccctgcgtccggaggcatgtagacccgcagctggtggggccgtgcatacccggggtcttgacttcgcctgcgatatctacatttgggcccctctggctggtacttgcggggtcctgctgctttcactcgtgatcactctttactgtaagcgcggtcggaagaagctgctgtacatctttaagcaacccttcatgaggcctgtgcagactactcaagaggaggacggctgttcatgccggttcccagaggaggaggaaggcggctgcgaactgcgcgtgaaattcagccgcagcgcagatgctccagcctacaagcaggggcagaaccagctctacaacgaactcaatcttggtcggagagaggagtacgacgtgctggacaagcggagaggacgggacccagaaatgggcgggaagccgcgcagaaagaatccccaagagggcctgtacaacgagctccaaaaggataagatggcagaagcctatagcgagattggtatgaaaggggaacgcagaagaggcaaaggccacgacggactgtaccagggactcagcaccgccaccaaggacacctatgacgctcttcacatgcaggccctgccgcctcgg

SEQ ID NO: 728 - protein, 248 aa, synthetic construct
  REGION 1..248: note = source = /note="Description of Artificial Sequence: Synthetic polypeptide"
QVQLVESGGGLVQPGGSLRLSCAASGFTFSSYAMSWVRQAPGKGLEWVSAISGSGGSTYYADSVKGRFTISRDNAKNSLYLQMNSLRAEDTAIYYCARATYKRELRYYYGMDVWGQGTMVTVSSGGGGSGGGGSGGGGSEIVMTQSPGTVSLSPGERATLSCRASQSVSSSFLAWYQQKPGQAPRLLIYGASSRATGIPDRFSGSGSGTDFTLTISRLEPEDSAVYYCQQYHSSPSWTFGQGTRLEIK

SEQ ID NO: 729 - DNA, 744 bp, synthetic construct
  misc_feature 1..744: note = source = /note="Description of Artificial Sequence: Synthetic polynucleotide"
  source 1..744: mol_type = other DNA
caagtgcagctcgtggaatcgggtggcggactggtgcagccggggggctcacttagactgtcctgcgcggccagcggattcactttctcctcctacgccatgtcctgggtcagacaggcccctggaaagggcctggaatgggtgtccgcaatcagcggcagcggcggctcgacctattacgcggattcagtgaagggcagattcaccatttcccgggacaacgccaagaactccttgtaccttcaaatgaactccctccgcgcggaagataccgcaatctactactgcgctcgggccacttacaagagggaactgcgctactactacgggatggacgtctggggccagggaaccatggtcaccgtgtccagcggaggaggaggatcgggaggaggcggtagcgggggtggagggtcggagatcgtgatgacccagtcccccggcactgtgtcgctgtcccccggcgaacgggccaccctgtcatgtcgggccagccagtcagtgtcgtcaagcttcctcgcctggtaccagcagaaaccgggacaagctccccgcctgctgatctacggagccagcagccgggccaccggtattcctgaccggttctccggttcggggtccgggaccgactttactctgactatctctcgcctcgagccagaggactccgccgtgtattactgccagcagtaccactcctccccgtcctggacgttcggacagggcacaaggctggagattaag

SEQ ID NO: 730 - protein, 124 aa, synthetic construct
  REGION 1..124: note = source = /note="Description of Artificial Sequence: Synthetic polypeptide"
QVQLVESGGGLVQPGGSLRLSCAASGFTFSSYAMSWVRQAPGKGLEWVSAISGSGGSTYYADSVKGRFTISRDNAKNSLYLQMNSLRAEDTAIYYCARATYKRELRYYYGMDVWGQGTMVTVSS

SEQ ID NO: 731 - protein, 109 aa, synthetic construct
  REGION 1..109: note = source = /note="Description of Artificial Sequence: Synthetic polypeptide"
EIVMTQSPGTVSLSPGERATLSCRASQSVSSSFLAWYQQKPGQAPRLLIYGASSRATGIPDRFSGSGSGTDFTLTISRLEPEDSAVYYCQQYHSSPSWTFGQGTRLEIK

SEQ ID NO: 732 - protein, 492 aa, synthetic construct
  REGION 1..492: note = source = /note="Description of Artificial Sequence: Synthetic polypeptide"
MALPVTALLLPLALLLHAARPQVQLVESGGGLVQPGGSLRLSCAASGFTFSSYAMSWVRQAPGKGLEWVSAISGSGGSTYYADSVKGRFTISRDNAKNSLYLQMNSLRAEDTAIYYCARATYKRELRYYYGMDVWGQGTMVTVSSGGGGSGGGGSGGGGSEIVMTQSPGTVSLSPGERATLSCRASQSVSSSFLAWYQQKPGQAPRLLIYGASSRATGIPDRFSGSGSGTDFTLTISRLEPEDSAVYYCQQYHSSPSWTFGQGTRLEIKTTTPAPRPPTPAPTIASQPLSLRPEACRPAAGGAVHTRGLDFACDIYIWAPLAGTCGVLLLSLVITLYCKRGRKKLLYIFKQPFMRPVQTTQEEDGCSCRFPEEEEGGCELRVKFSRSADAPAYKQGQNQLYNELNLGRREEYDVLDKRRGRDPEMGGKPRRKNPQEGLYNELQKDKMAEAYSEIGMKGERRRGKGHDGLYQGLSTATKDTYDALHMQALPPR

SEQ ID NO: 733 - DNA, 1476 bp, synthetic construct
  misc_feature 1..1476: note = source = /note="Description of Artificial Sequence: Synthetic polynucleotide"
  source 1..1476: mol_type = other DNA
atggccctccctgtcaccgccctgctgcttccgctggctcttctgctccacgccgctcggccccaagtgcagctcgtggaatcgggtggcggactggtgcagccggggggctcacttagactgtcctgcgcggccagcggattcactttctcctcctacgccatgtcctgggtcagacaggcccctggaaagggcctggaatgggtgtccgcaatcagcggcagcggcggctcgacctattacgcggattcagtgaagggcagattcaccatttcccgggacaacgccaagaactccttgtaccttcaaatgaactccctccgcgcggaagataccgcaatctactactgcgctcgggccacttacaagagggaactgcgctactactacgggatggacgtctggggccagggaaccatggtcaccgtgtccagcggaggaggaggatcgggaggaggcggtagcgggggtggagggtcggagatcgtgatgacccagtcccccggcactgtgtcgctgtcccccggcgaacgggccaccctgtcatgtcgggccagccagtcagtgtcgtcaagcttcctcgcctggtaccagcagaaaccgggacaagctccccgcctgctgatctacggagccagcagccgggccaccggtattcctgaccggttctccggttcggggtccgggaccgactttactctgactatctctcgcctcgagccagaggactccgccgtgtattactgccagcagtaccactcctccccgtcctggacgttcggacagggcacaaggctggagattaagaccactaccccagcaccgaggccacccaccccggctcctaccatcgcctcccagcctctgtccctgcgtccggaggcatgtagacccgcagctggtggggccgtgcatacccggggtcttgacttcgcctgcgatatctacatttgggcccctctggctggtacttgcggggtcctgctgctttcactcgtgatcactctttactgtaagcgcggtcggaagaagctgctgtacatctttaagcaacccttcatgaggcctgtgcagactactcaagaggaggacggctgttcatgccggttcccagaggaggaggaaggcggctgcgaactgcgcgtgaaattcagccgcagcgcagatgctccagcctacaagcaggggcagaaccagctctacaacgaactcaatcttggtcggagagaggagtacgacgtgctggacaagcggagaggacgggacccagaaatgggcgggaagccgcgcagaaagaatccccaagagggcctgtacaacgagctccaaaaggataagatggcagaagcctatagcgagattggtatgaaaggggaacgcagaagaggcaaaggccacgacggactgtaccagggactcagcaccgccaccaaggacacctatgacgctcttcacatgcaggccctgccgcctcgg

SEQ ID NO: 734 - protein, 248 aa, synthetic construct
  REGION 1..248: note = source = /note="Description of Artificial Sequence: Synthetic polypeptide"
EVQLVETGGGLVQPGGSLRLSCAASGFTFSSYAMSWVRQAPGKGLEWVSAISGSGGSTYYADSVKGRFTISRDNSKNTLYLQMNTLKAEDTAVYYCARATYKRELRYYYGMDVWGQGTTVTVSSGGGGSGGGGSGGGGSEIVLTQSPSTLSLSPGESATLSCRASQSVSTTFLAWYQQKPGQAPRLLIYGSSNRATGIPDRFSGSGSGTDFTLTIRRLEPEDFAVYYCQQYHSSPSWTFGQGTKVEIK

SEQ ID NO: 735 - DNA, 744 bp, synthetic construct
  misc_feature 1..744: note = source = /note="Description of Artificial Sequence: Synthetic polynucleotide"
  source 1..744: mol_type = other DNA
gaggtgcagcttgtggaaaccggtggcggactggtgcagcccggaggaagcctcaggctgtcctgcgccgcgtccggcttcaccttctcctcgtacgccatgtcctgggtccgccaggcccccggaaagggcctggaatgggtgtccgccatctctggaagcggaggttccacgtactacgcggacagcgtcaagggaaggttcacaatctcccgcgataattcgaagaacactctgtaccttcaaatgaacaccctgaaggccgaggacactgctgtgtactactgcgcacgggccacctacaagagagagctccggtactactacggaatggacgtctggggccagggaactactgtgaccgtgtcctcgggagggggtggctccggggggggcggctccggcggaggcggttccgagattgtgctgacccagtcaccttcaactctgtcgctgtccccgggagagagcgctactctgagctgccgggccagccagtccgtgtccaccaccttcctcgcctggtatcagcagaagccggggcaggcaccacggctcttgatctacgggtcaagcaacagagcgaccggaattcctgaccgcttctcggggagcggttcaggcaccgacttcaccctgactatccggcgcctggaacccgaagatttcgccgtgtattactgtcaacagtaccactcctcgccgtcctggacctttggccaaggaaccaaagtggaaatcaag

SEQ ID NO: 736 - protein, 124 aa, synthetic construct
  REGION 1..124: note = source = /note="Description of Artificial Sequence: Synthetic polypeptide"
EVQLVETGGGLVQPGGSLRLSCAASGFTFSSYAMSWVRQAPGKGLEWVSAISGSGGSTYYADSVKGRFTISRDNSKNTLYLQMNTLKAEDTAVYYCARATYKRELRYYYGMDVWGQGTTVTVSS

SEQ ID NO: 737 - protein, 109 aa, synthetic construct
  REGION 1..109: note = source = /note="Description of Artificial Sequence: Synthetic polypeptide"
EIVLTQSPSTLSLSPGESATLSCRASQSVSTTFLAWYQQKPGQAPRLLIYGSSNRATGIPDRFSGSGSGTDFTLTIRRLEPEDFAVYYCQQYHSSPSWTFGQGTKVEIK

SEQ ID NO: 738 - protein, 492 aa, synthetic construct
  REGION 1..492: note = source = /note="Description of Artificial Sequence: Synthetic polypeptide"
MALPVTALLLPLALLLHAARPEVQLVETGGGLVQPGGSLRLSCAASGFTFSSYAMSWVRQAPGKGLEWVSAISGSGGSTYYADSVKGRFTISRDNSKNTLYLQMNTLKAEDTAVYYCARATYKRELRYYYGMDVWGQGTTVTVSSGGGGSGGGGSGGGGSEIVLTQSPSTLSLSPGESATLSCRASQSVSTTFLAWYQQKPGQAPRLLIYGSSNRATGIPDRFSGSGSGTDFTLTIRRLEPEDFAVYYCQQYHSSPSWTFGQGTKVEIKTTTPAPRPPTPAPTIASQPLSLRPEACRPAAGGAVHTRGLDFACDIYIWAPLAGTCGVLLLSLVITLYCKRGRKKLLYIFKQPFMRPVQTTQEEDGCSCRFPEEEEGGCELRVKFSRSADAPAYKQGQNQLYNELNLGRREEYDVLDKRRGRDPEMGGKPRRKNPQEGLYNELQKDKMAEAYSEIGMKGERRRGKGHDGLYQGLSTATKDTYDALHMQALPPR

SEQ ID NO: 739 - DNA, 1476 bp, synthetic construct
  misc_feature 1..1476: note = source = /note="Description of Artificial Sequence: Synthetic polynucleotide"
  source 1..1476: mol_type = other DNA
atggccctccctgtcaccgccctgctgcttccgctggctcttctgctccacgccgctcggcccgaggtgcagcttgtggaaaccggtggcggactggtgcagcccggaggaagcctcaggctgtcctgcgccgcgtccggcttcaccttctcctcgtacgccatgtcctgggtccgccaggcccccggaaagggcctggaatgggtgtccgccatctctggaagcggaggttccacgtactacgcggacagcgtcaagggaaggttcacaatctcccgcgataattcgaagaacactctgtaccttcaaatgaacaccctgaaggccgaggacactgctgtgtactactgcgcacgggccacctacaagagagagctccggtactactacggaatggacgtctggggccagggaactactgtgaccgtgtcctcgggagggggtggctccggggggggcggctccggcggaggcggttccgagattgtgctgacccagtcaccttcaactctgtcgctgtccccgggagagagcgctactctgagctgccgggccagccagtccgtgtccaccaccttcctcgcctggtatcagcagaagccggggcaggcaccacggctcttgatctacgggtcaagcaacagagcgaccggaattcctgaccgcttctcggggagcggttcaggcaccgacttcaccctgactatccggcgcctggaacccgaagatttcgccgtgtattactgtcaacagtaccactcctcgccgtcctggacctttggccaaggaaccaaagtggaaatcaagaccactaccccagcaccgaggccacccaccccggctcctaccatcgcctcccagcctctgtccctgcgtccggaggcatgtagacccgcagctggtggggccgtgcatacccggggtcttgacttcgcctgcgatatctacatttgggcccctctggctggtacttgcggggtcctgctgctttcactcgtgatcactctttactgtaagcgcggtcggaagaagctgctgtacatctttaagcaacccttcatgaggcctgtgcagactactcaagaggaggacggctgttcatgccggttcccagaggaggaggaaggcggctgcgaactgcgcgtgaaattcagccgcagcgcagatgctccagcctacaagcaggggcagaaccagctctacaacgaactcaatcttggtcggagagaggagtacgacgtgctggacaagcggagaggacgggacccagaaatgggcgggaagccgcgcagaaagaatccccaagagggcctgtacaacgagctccaaaaggataagatggcagaagcctatagcgagattggtatgaaaggggaacgcagaagaggcaaaggccacgacggactgtaccagggactcagcaccgccaccaaggacacctatgacgctcttcacatgcaggccctgccgcctcgg

SEQ ID NO: 740 - protein, 239 aa, synthetic construct
  REGION 1..239: note = source = /note="Description of Artificial Sequence: Synthetic polypeptide"
EVQLVETGGGLVQPGRSLRLSCAASGFTFDDYAMHWVRQAPGKGLEWVSGISWNSGSIGYADSVKGRFTISRDNAKNSLYLQMNSLRDEDTAVYYCARVGKAVPDVWGQGTTVTVSSGGGGSGGGGSGGGGSDIVMTQTPSSLSASVGDRVTITCRASQSISSYLNWYQQKPGKAPKLLIYAASSLQSGVPSRFSGSGSGTDFTLTISSLQPEDFATYYCQQSYSTPYSFGQGTRLEIK

SEQ ID NO: 741 - DNA, 717 bp, synthetic construct
  misc_feature 1..717: note = source = /note="Description of Artificial Sequence: Synthetic polynucleotide"
  source 1..717: mol_type = other DNA
gaagtgcagctcgtggaaactggaggtggactcgtgcagcctggacggtcgctgcggctgagctgcgctgcatccggcttcaccttcgacgattatgccatgcactgggtcagacaggcgccagggaagggacttgagtgggtgtccggtatcagctggaatagcggctcaatcggatacgcggactccgtgaagggaaggttcaccatttcccgcgacaacgccaagaactccctgtacttgcaaatgaacagcctccgggatgaggacactgccgtgtactactgcgcccgcgtcggaaaagctgtgcccgacgtctggggccagggaaccactgtgaccgtgtccagcggcgggggtggatcgggcggtggagggtccggtggagggggctcagatattgtgatgacccagaccccctcgtccctgtccgcctcggtcggcgaccgcgtgactatcacatgtagagcctcgcagagcatctccagctacctgaactggtatcagcagaagccggggaaggccccgaagctcctgatctacgcggcatcatcactgcaatcgggagtgccgagccggttttccgggtccggctccggcaccgacttcacgctgaccatttcttccctgcaacccgaggacttcgccacttactactgccagcagtcctactccaccccttactccttcggccaaggaaccaggctggaaatcaag

SEQ ID NO: 742 - protein, 117 aa, synthetic construct
  REGION 1..117: note = source = /note="Description of Artificial Sequence: Synthetic polypeptide"
EVQLVETGGGLVQPGRSLRLSCAASGFTFDDYAMHWVRQAPGKGLEWVSGISWNSGSIGYADSVKGRFTISRDNAKNSLYLQMNSLRDEDTAVYYCARVGKAVPDVWGQGTTVTVSS

SEQ ID NO: 743 - protein, 107 aa, synthetic construct
  REGION 1..107: note = source = /note="Description of Artificial Sequence: Synthetic polypeptide"
DIVMTQTPSSLSASVGDRVTITCRASQSISSYLNWYQQKPGKAPKLLIYAASSLQSGVPSRFSGSGSGTDFTLTISSLQPEDFATYYCQQSYSTPYSFGQGTRLEIK

SEQ ID NO: 744 - protein, 483 aa, synthetic construct
  REGION 1..483: note = source = /note="Description of Artificial Sequence: Synthetic polypeptide"
MALPVTALLLPLALLLHAARPEVQLVETGGGLVQPGRSLRLSCAASGFTFDDYAMHWVRQAPGKGLEWVSGISWNSGSIGYADSVKGRFTISRDNAKNSLYLQMNSLRDEDTAVYYCARVGKAVPDVWGQGTTVTVSSGGGGSGGGGSGGGGSDIVMTQTPSSLSASVGDRVTITCRASQSISSYLNWYQQKPGKAPKLLIYAASSLQSGVPSRFSGSGSGTDFTLTISSLQPEDFATYYCQQSYSTPYSFGQGTRLEIKTTTPAPRPPTPAPTIASQPLSLRPEACRPAAGGAVHTRGLDFACDIYIWAPLAGTCGVLLLSLVITLYCKRGRKKLLYIFKQPFMRPVQTTQEEDGCSCRFPEEEEGGCELRVKFSRSADAPAYKQGQNQLYNELNLGRREEYDVLDKRRGRDPEMGGKPRRKNPQEGLYNELQKDKMAEAYSEIGMKGERRRGKGHDGLYQGLSTATKDTYDALHMQALPPR

SEQ ID NO: 745 - DNA, 1449 bp, synthetic construct
  misc_feature 1..1449: note = source = /note="Description of Artificial Sequence: Synthetic polynucleotide"
  source 1..1449: mol_type = other DNA
atggccctccctgtcaccgccctgctgcttccgctggctcttctgctccacgccgctcggcccgaagtgcagctcgtggaaactggaggtggactcgtgcagcctggacggtcgctgcggctgagctgcgctgcatccggcttcaccttcgacgattatgccatgcactgggtcagacaggcgccagggaagggacttgagtgggtgtccggtatcagctggaatagcggctcaatcggatacgcggactccgtgaagggaaggttcaccatttcccgcgacaacgccaagaactccctgtacttgcaaatgaacagcctccgggatgaggacactgccgtgtactactgcgcccgcgtcggaaaagctgtgcccgacgtctggggccagggaaccactgtgaccgtgtccagcggcgggggtggatcgggcggtggagggtccggtggagggggctcagatattgtgatgacccagaccccctcgtccctgtccgcctcggtcggcgaccgcgtgactatcacatgtagagcctcgcagagcatctccagctacctgaactggtatcagcagaagccggggaaggccccgaagctcctgatctacgcggcatcatcactgcaatcgggagtgccgagccggttttccgggtccggctccggcaccgacttcacgctgaccatttcttccctgcaacccgaggacttcgccacttactactgccagcagtcctactccaccccttactccttcggccaaggaaccaggctggaaatcaagaccactaccccagcaccgaggccacccaccccggctcctaccatcgcctcccagcctctgtccctgcgtccggaggcatgtagacccgcagctggtggggccgtgcatacccggggtcttgacttcgcctgcgatatctacatttgggcccctctggctggtacttgcggggtcctgctgctttcactcgtgatcactctttactgtaagcgcggtcggaagaagctgctgtacatctttaagcaacccttcatgaggcctgtgcagactactcaagaggaggacggctgttcatgccggttcccagaggaggaggaaggcggctgcgaactgcgcgtgaaattcagccgcagcgcagatgctccagcctacaagcaggggcagaaccagctctacaacgaactcaatcttggtcggagagaggagtacgacgtgctggacaagcggagaggacgggacccagaaatgggcgggaagccgcgcagaaagaatccccaagagggcctgtacaacgagctccaaaaggataagatggcagaagcctatagcgagattggtatgaaaggggaacgcagaagaggcaaaggccacgacggactgtaccagggactcagcaccgccaccaaggacacctatgacgctcttcacatgcaggccctgccgcctcgg

SEQ ID NO: 746 - protein, 246 aa, synthetic construct
  REGION 1..246: note = source = /note="Description of Artificial Sequence: Synthetic polypeptide"
EVQLVESGGGLVQPGRSLRLSCTASGFTFDDYAMHWVRQRPGKGLEWVASINWKGNSLAYGDSVKGRFAISRDNAKNTVFLQMNSLRTEDTAVYYCASHQGVAYYNYAMDVWGRGTLVTVSSGGGGSGGGGSGGGGSEIVLTQSPGTLSLSPGERATLSCRATQSIGSSFLAWYQQRPGQAPRLLIYGASQRATGIPDRFSGRGSGTDFTLTISRVEPEDSAVYYCQHYESSPSWTFGQGTKVEIK

SEQ ID NO: 747 - DNA, 738 bp, synthetic construct
  misc_feature 1..738: note = source = /note="Description of Artificial Sequence: Synthetic polynucleotide"
  source 1..738: mol_type = other DNA
gaagtgcagctcgtggagagcgggggaggattggtgcagcccggaaggtccctgcggctctcctgcactgcgtctggcttcaccttcgacgactacgcgatgcactgggtcagacagcgcccgggaaagggcctggaatgggtcgcctcaatcaactggaagggaaactccctggcctatggcgacagcgtgaagggccgcttcgccatttcgcgcgacaacgccaagaacaccgtgtttctgcaaatgaattccctgcggaccgaggataccgctgtgtactactgcgccagccaccagggcgtggcatactataactacgccatggacgtgtggggaagagggacgctcgtcaccgtgtcctccgggggcggtggatcgggtggaggaggaagcggtggcgggggcagcgaaatcgtgctgactcagagcccgggaactctttcactgtccccgggagaacgggccactctctcgtgccgggccacccagtccatcggctcctccttccttgcctggtaccagcagaggccaggacaggcgccccgcctgctgatctacggtgcttcccaacgcgccactggcattcctgaccggttcagcggcagagggtcgggaaccgatttcacactgaccatttcccgggtggagcccgaagattcggcagtctactactgtcagcattacgagtcctccccttcatggaccttcggtcaagggaccaaagtggagatcaag

SEQ ID NO: 748 - protein, 122 aa, synthetic construct
  REGION 1..122: note = source = /note="Description of Artificial Sequence: Synthetic polypeptide"
EVQLVESGGGLVQPGRSLRLSCTASGFTFDDYAMHWVRQRPGKGLEWVASINWKGNSLAYGDSVKGRFAISRDNAKNTVFLQMNSLRTEDTAVYYCASHQGVAYYNYAMDVWGRGTLVTVSS

SEQ ID NO: 749 - protein, 109 aa, synthetic construct
  REGION 1..109: note = source = /note="Description of Artificial Sequence: Synthetic polypeptide"
EIVLTQSPGTLSLSPGERATLSCRATQSIGSSFLAWYQQRPGQAPRLLIYGASQRATGIPDRFSGRGSGTDFTLTISRVEPEDSAVYYCQHYESSPSWTFGQGTKVEIK

SEQ ID NO: 750 - protein, 490 aa, synthetic construct
  REGION 1..490: note = source = /note="Description of Artificial Sequence: Synthetic polypeptide"
MALPVTALLLPLALLLHAARPEVQLVESGGGLVQPGRSLRLSCTASGFTFDDYAMHWVRQRPGKGLEWVASINWKGNSLAYGDSVKGRFAISRDNAKNTVFLQMNSLRTEDTAVYYCASHQGVAYYNYAMDVWGRGTLVTVSSGGGGSGGGGSGGGGSEIVLTQSPGTLSLSPGERATLSCRATQSIGSSFLAWYQQRPGQAPRLLIYGASQRATGIPDRFSGRGSGTDFTLTISRVEPEDSAVYYCQHYESSPSWTFGQGTKVEIKTTTPAPRPPTPAPTIASQPLSLRPEACRPAAGGAVHTRGLDFACDIYIWAPLAGTCGVLLLSLVITLYCKRGRKKLLYIFKQPFMRPVQTTQEEDGCSCRFPEEEEGGCELRVKFSRSADAPAYKQGQNQLYNELNLGRREEYDVLDKRRGRDPEMGGKPRRKNPQEGLYNELQKDKMAEAYSEIGMKGERRRGKGHDGLYQGLSTATKDTYDALHMQALPPR

SEQ ID NO: 751 - DNA, 1470 bp, synthetic construct
  misc_feature 1..1470: note = source = /note="Description of Artificial Sequence: Synthetic polynucleotide"
  source 1..1470: mol_type = other DNA
atggccctccctgtcaccgccctgctgcttccgctggctcttctgctccacgccgctcggcccgaagtgcagctcgtggagagcgggggaggattggtgcagcccggaaggtccctgcggctctcctgcactgcgtctggcttcaccttcgacgactacgcgatgcactgggtcagacagcgcccgggaaagggcctggaatgggtcgcctcaatcaactggaagggaaactccctggcctatggcgacagcgtgaagggccgcttcgccatttcgcgcgacaacgccaagaacaccgtgtttctgcaaatgaattccctgcggaccgaggataccgctgtgtactactgcgccagccaccagggcgtggcatactataactacgccatggacgtgtggggaagagggacgctcgtcaccgtgtcctccgggggcggtggatcgggtggaggaggaagcggtggcgggggcagcgaaatcgtgctgactcagagcccgggaactctttcactgtccccgggagaacgggccactctctcgtgccgggccacccagtccatcggctcctccttccttgcctggtaccagcagaggccaggacaggcgccccgcctgctgatctacggtgcttcccaacgcgccactggcattcctgaccggttcagcggcagagggtcgggaaccgatttcacactgaccatttcccgggtggagcccgaagattcggcagtctactactgtcagcattacgagtcctccccttcatggaccttcggtcaagggaccaaagtggagatcaagaccactaccccagcaccgaggccacccaccccggctcctaccatcgcctcccagcctctgtccctgcgtccggaggcatgtagacccgcagctggtggggccgtgcatacccggggtcttgacttcgcctgcgatatctacatttgggcccctctggctggtacttgcggggtcctgctgctttcactcgtgatcactctttactgtaagcgcggtcggaagaagctgctgtacatctttaagcaacccttcatgaggcctgtgcagactactcaagaggaggacggctgttcatgccggttcccagaggaggaggaaggcggctgcgaactgcgcgtgaaattcagccgcagcgcagatgctccagcctacaagcaggggcagaaccagctctacaacgaactcaatcttggtcggagagaggagtacgacgtgctggacaagcggagaggacgggacccagaaatgggcgggaagccgcgcagaaagaatccccaagagggcctgtacaacgagctccaaaaggataagatggcagaagcctatagcgagattggtatgaaaggggaacgcagaagaggcaaaggccacgacggactgtaccagggactcagcaccgccaccaaggacacctatgacgctcttcacatgcaggccctgccgcctcgg

SEQ ID NO: 752 - protein, 241 aa, synthetic construct
  REGION 1..241: note = source = /note="Description of Artificial Sequence: Synthetic polypeptide"
EVQLVESGGGLVQPGGSLRLSCAASGFTFSSYAMSWVRQAPGKGLEWVSAISGSGGSTYYADSVKGRFTISRDNSKNTLYLQMNSLRAEDTAVYYCAKVVRDGMDVWGQGTTVTVSSGGGGSGGGGSGGGGSEIVLTQSPATLSLSPGERATLSCRASQSVSSSYLAWYQQKPGQAPRLLIYGASSRATGIPDRFSGNGSGTDFTLTISRLEPEDFAVYYCQQYGSPPRFTFGPGTKVDIK

SEQ ID NO: 753 - DNA, 723 bp, synthetic construct
  misc_feature 1..723: note = source = /note="Description of Artificial Sequence: Synthetic polynucleotide"
  source 1..723: mol_type = other DNA
gaggtgcagttggtcgaaagcgggggcgggcttgtgcagcctggcggatcactgcggctgtcctgcgcggcatcaggcttcacgttttcttcctacgccatgtcctgggtgcgccaggcccctggaaagggactggaatgggtgtccgcgatttcggggtccggcgggagcacctactacgccgattccgtgaagggccgcttcactatctcgcgggacaactccaagaacaccctctacctccaaatgaatagcctgcgggccgaggataccgccgtctactattgcgctaaggtcgtgcgcgacggaatggacgtgtggggacagggtaccaccgtgacagtgtcctcggggggaggcggtagcggcggaggaggaagcggtggtggaggttccgagattgtgctgactcaatcacccgcgaccctgagcctgtcccccggcgaaagggccactctgtcctgtcgggccagccaatcagtctcctcctcgtacctggcctggtaccagcagaagccaggacaggctccgagactccttatctatggcgcatcctcccgcgccaccggaatcccggataggttctcgggaaacggatcggggaccgacttcactctcaccatctcccggctggaaccggaggacttcgccgtgtactactgccagcagtacggcagcccgcctagattcactttcggccccggcaccaaagtggacatcaag

SEQ ID NO: 754 - protein, 117 aa, synthetic construct
  REGION 1..117: note = source = /note="Description of Artificial Sequence: Synthetic polypeptide"
EVQLVESGGGLVQPGGSLRLSCAASGFTFSSYAMSWVRQAPGKGLEWVSAISGSGGSTYYADSVKGRFTISRDNSKNTLYLQMNSLRAEDTAVYYCAKVVRDGMDVWGQGTTVTVSS

SEQ ID NO: 755 - protein, 109 aa, synthetic construct
  REGION 1..109: note = source = /note="Description of Artificial Sequence: Synthetic polypeptide"
EIVLTQSPATLSLSPGERATLSCRASQSVSSSYLAWYQQKPGQAPRLLIYGASSRATGIPDRFSGNGSGTDFTLTISRLEPEDFAVYYCQQYGSPPRFTFGPGTKVDIK

SEQ ID NO: 756 - protein, 485 aa, synthetic construct
  REGION 1..485: note = source = /note="Description of Artificial Sequence: Synthetic polypeptide"
MALPVTALLLPLALLLHAARPEVQLVESGGGLVQPGGSLRLSCAASGFTFSSYAMSWVRQAPGKGLEWVSAISGSGGSTYYADSVKGRFTISRDNSKNTLYLQMNSLRAEDTAVYYCAKVVRDGMDVWGQGTTVTVSSGGGGSGGGGSGGGGSEIVLTQSPATLSLSPGERATLSCRASQSVSSSYLAWYQQKPGQAPRLLIYGASSRATGIPDRFSGNGSGTDFTLTISRLEPEDFAVYYCQQYGSPPRFTFGPGTKVDIKTTTPAPRPPTPAPTIASQPLSLRPEACRPAAGGAVHTRGLDFACDIYIWAPLAGTCGVLLLSLVITLYCKRGRKKLLYIFKQPFMRPVQTTQEEDGCSCRFPEEEEGGCELRVKFSRSADAPAYKQGQNQLYNELNLGRREEYDVLDKRRGRDPEMGGKPRRKNPQEGLYNELQKDKMAEAYSEIGMKGERRRGKGHDGLYQGLSTATKDTYDALHMQALPPR

SEQ ID NO: 757 - DNA, 1455 bp, synthetic construct
  misc_feature 1..1455: note = source = /note="Description of Artificial Sequence: Synthetic polynucleotide"
  source 1..1455: mol_type = other DNA
atggccctccctgtcaccgccctgctgcttccgctggctcttctgctccacgccgctcggcccgaggtgcagttggtcgaaagcgggggcgggcttgtgcagcctggcggatcactgcggctgtcctgcgcggcatcaggcttcacgttttcttcctacgccatgtcctgggtgcgccaggcccctggaaagggactggaatgggtgtccgcgatttcggggtccggcgggagcacctactacgccgattccgtgaagggccgcttcactatctcgcgggacaactccaagaacaccctctacctccaaatgaatagcctgcgggccgaggataccgccgtctactattgcgctaaggtcgtgcgcgacggaatggacgtgtggggacagggtaccaccgtgacagtgtcctcggggggaggcggtagcggcggaggaggaagcggtggtggaggttccgagattgtgctgactcaatcacccgcgaccctgagcctgtcccccggcgaaagggccactctgtcctgtcgggccagccaatcagtctcctcctcgtacctggcctggtaccagcagaagccaggacaggctccgagactccttatctatggcgcatcctcccgcgccaccggaatcccggataggttctcgggaaacggatcggggaccgacttcactctcaccatctcccggctggaaccggaggacttcgccgtgtactactgccagcagtacggcagcccgcctagattcactttcggccccggcaccaaagtggacatcaagaccactaccccagcaccgaggccacccaccccggctcctaccatcgcctcccagcctctgtccctgcgtccggaggcatgtagacccgcagctggtggggccgtgcatacccggggtcttgacttcgcctgcgatatctacatttgggcccctctggctggtacttgcggggtcctgctgctttcactcgtgatcactctttactgtaagcgcggtcggaagaagctgctgtacatctttaagcaacccttcatgaggcctgtgcagactactcaagaggaggacggctgttcatgccggttcccagaggaggaggaaggcggctgcgaactgcgcgtgaaattcagccgcagcgcagatgctccagcctacaagcaggggcagaaccagctctacaacgaactcaatcttggtcggagagaggagtacgacgtgctggacaagcggagaggacgggacccagaaatgggcgggaagccgcgcagaaagaatccccaagagggcctgtacaacgagctccaaaaggataagatggcagaagcctatagcgagattggtatgaaaggggaacgcagaagaggcaaaggccacgacggactgtaccagggactcagcaccgccaccaaggacacctatgacgctcttcacatgcaggccctgccgcctcgg

SEQ ID NO: 758 - protein, 242 aa, synthetic construct
  REGION 1..242: note = source = /note="Description of Artificial Sequence: Synthetic polypeptide"
EVQLLESGGGLVQPGGSLRLSCAASGFTFSSYAMSWVRQAPGKGLEWVSAISGSGGSTYYADSVKGRFTISRDNSKNTLYLQMNSLRAEDTAVYYCAKIPQTGTFDYWGQGTLVTVSSGGGGSGGGGSGGGGSEIVLTQSPGTLSLSPGERATLSCRASQSVSSSYLAWYQQRPGQAPRLLIYGASSRATGIPDRFSGSGSGTDFTLTISRLEPEDFAVYYCQHYGSSPSWTFGQGTRLEIK

SEQ ID NO: 759 - DNA, 726 bp, synthetic construct
  misc_feature 1..726: note = source = /note="Description of Artificial Sequence: Synthetic polynucleotide"
  source 1..726: mol_type = other DNA
gaagtgcagctgctggagtccggcggtggattggtgcaaccggggggatcgctcagactgtcctgtgcggcgtcaggcttcaccttctcgagctacgccatgtcatgggtcagacaggcccctggaaagggtctggaatgggtgtccgccatttccgggagcgggggatctacatactacgccgatagcgtgaagggccgcttcaccatttcccgggacaactccaagaacactctctatctgcaaatgaactccctccgcgctgaggacactgccgtgtactactgcgccaaaatccctcagaccggcaccttcgactactggggacaggggactctggtcaccgtcagcagcggtggcggaggttcggggggaggaggaagcggcggcggagggtccgagattgtgctgacccagtcacccggcactttgtccctgtcgcctggagaaagggccaccctttcctgccgggcatcccaatccgtgtcctcctcgtacctggcctggtaccagcagaggcccggacaggccccacggcttctgatctacggagcaagcagccgcgcgaccggtatcccggaccggttttcgggctcgggctcaggaactgacttcaccctcaccatctcccgcctggaacccgaagatttcgctgtgtattactgccagcactacggcagctccccgtcctggacgttcggccagggaactcggctggagatcaag

SEQ ID NO: 760 - protein, 118 aa, synthetic construct
  REGION 1..118: note = source = /note="Description of Artificial Sequence: Synthetic polypeptide"
EVQLLESGGGLVQPGGSLRLSCAASGFTFSSYAMSWVRQAPGKGLEWVSAISGSGGSTYYADSVKGRFTISRDNSKNTLYLQMNSLRAEDTAVYYCAKIPQTGTFDYWGQGTLVTVSS

SEQ ID NO: 761 - protein, 109 aa, synthetic construct
  REGION 1..109: note = source = /note="Description of Artificial Sequence: Synthetic polypeptide"
EIVLTQSPGTLSLSPGERATLSCRASQSVSSSYLAWYQQRPGQAPRLLIYGASSRATGIPDRFSGSGSGTDFTLTISRLEPEDFAVYYCQHYGSSPSWTFGQGTRLEIK

SEQ ID NO: 762 - protein, 486 aa, synthetic construct
  REGION 1..486: note = source = /note="Description of Artificial Sequence: Synthetic polypeptide"
MALPVTALLLPLALLLHAARPEVQLLESGGGLVQPGGSLRLSCAASGFTFSSYAMSWVRQAPGKGLEWVSAISGSGGSTYYADSVKGRFTISRDNSKNTLYLQMNSLRAEDTAVYYCAKIPQTGTFDYWGQGTLVTVSSGGGGSGGGGSGGGGSEIVLTQSPGTLSLSPGERATLSCRASQSVSSSYLAWYQQRPGQAPRLLIYGASSRATGIPDRFSGSGSGTDFTLTISRLEPEDFAVYYCQHYGSSPSWTFGQGTRLEIKTTTPAPRPPTPAPTIASQPLSLRPEACRPAAGGAVHTRGLDFACDIYIWAPLAGTCGVLLLSLVITLYCKRGRKKLLYIFKQPFMRPVQTTQEEDGCSCRFPEEEEGGCELRVKFSRSADAPAYKQGQNQLYNELNLGRREEYDVLDKRRGRDPEMGGKPRRKNPQEGLYNELQKDKMAEAYSEIGMKGERRRGKGHDGLYQGLSTATKDTYDALHMQALPPR

SEQ ID NO: 763 - DNA, 1458 bp, synthetic construct
  misc_feature 1..1458: note = source = /note="Description of Artificial Sequence: Synthetic polynucleotide"
  source 1..1458: mol_type = other DNA
atggccctccctgtcaccgccctgctgcttccgctggctcttctgctccacgccgctcggcccgaagtgcagctgctggagtccggcggtggattggtgcaaccggggggatcgctcagactgtcctgtgcggcgtcaggcttcaccttctcgagctacgccatgtcatgggtcagacaggcccctggaaagggtctggaatgggtgtccgccatttccgggagcgggggatctacatactacgccgatagcgtgaagggccgcttcaccatttcccgggacaactccaagaacactctctatctgcaaatgaactccctccgcgctgaggacactgccgtgtactactgcgccaaaatccctcagaccggcaccttcgactactggggacaggggactctggtcaccgtcagcagcggtggcggaggttcggggggaggaggaagcggcggcggagggtccgagattgtgctgacccagtcacccggcactttgtccctgtcgcctggagaaagggccaccctttcctgccgggcatcccaatccgtgtcctcctcgtacctggcctggtaccagcagaggcccggacaggccccacggcttctgatctacggagcaagcagccgcgcgaccggtatcccggaccggttttcgggctcgggctcaggaactgacttcaccctcaccatctcccgcctggaacccgaagatttcgctgtgtattactgccagcactacggcagctccccgtcctggacgttcggccagggaactcggctggagatcaagaccactaccccagcaccgaggccacccaccccggctcctaccatcgcctcccagcctctgtccctgcgtccggaggcatgtagacccgcagctggtggggccgtgcatacccggggtcttgacttcgcctgcgatatctacatttgggcccctctggctggtacttgcggggtcctgctgctttcactcgtgatcactctttactgtaagcgcggtcggaagaagctgctgtacatctttaagcaacccttcatgaggcctgtgcagactactcaagaggaggacggctgttcatgccggttcccagaggaggaggaaggcggctgcgaactgcgcgtgaaattcagccgcagcgcagatgctccagcctacaagcaggggcagaaccagctctacaacgaactcaatcttggtcggagagaggagtacgacgtgctggacaagcggagaggacgggacccagaaatgggcgggaagccgcgcagaaagaatccccaagagggcctgtacaacgagctccaaaaggataagatggcagaagcctatagcgagattggtatgaaaggggaacgcagaagaggcaaaggccacgacggactgtaccagggactcagcaccgccaccaaggacacctatgacgctcttcacatgcaggccctgccgcctcgg

SEQ ID NO: 764 - protein, 248 aa, synthetic construct
  REGION 1..248: note = source = /note="Description of Artificial Sequence: Synthetic polypeptide"
EVQLVETGGGLVQPGGSLRLSCAASGFTFSSYAMSWVRQAPGKGLEWVSAISGSGGSTYYADSVKGRFTMSRENDKNSVFLQMNSLRVEDTGVYYCARANYKRELRYYYGMDVWGQGTMVTVSSGGGGSGGGGSGGGGSEIVMTQSPGTLSLSPGESATLSCRASQRVASNYLAWYQHKPGQAPSLLISGASSRATGVPDRFSGSGSGTDFTLAISRLEPEDSAVYYCQHYDSSPSWTFGQGTKVEIK

SEQ ID NO: 765 - DNA, 744 bp, synthetic construct
  misc_feature 1..744: note = source = /note="Description of Artificial Sequence: Synthetic polynucleotide"
  source 1..744: mol_type = other DNA
gaagtgcaactggtggaaaccggtggaggactcgtgcagcctggcggcagcctccggctgagctgcgccgcttcgggattcaccttttcctcctacgcgatgtcttgggtcagacaggcccccggaaaggggctggaatgggtgtcagccatctccggctccggcggatcaacgtactacgccgactccgtgaaaggccggttcaccatgtcgcgcgagaatgacaagaactccgtgttcctgcaaatgaactccctgagggtggaggacaccggagtgtactattgtgcgcgcgccaactacaagagagagctgcggtactactacggaatggacgtctggggacagggaactatggtgaccgtgtcatccggtggagggggaagcggcggtggaggcagcgggggcgggggttcagaaattgtcatgacccagtccccgggaactctttccctctcccccggggaatccgcgactttgtcctgccgggccagccagcgcgtggcctcgaactacctcgcatggtaccagcataagccaggccaagccccttccctgctgatttccggggctagcagccgcgccactggcgtgccggataggttctcgggaagcggctcgggtaccgatttcaccctggcaatctcgcggctggaaccggaggattcggccgtgtactactgccagcactatgactcatccccctcctggacattcggacagggcaccaaggtcgagatcaag

SEQ ID NO: 766 - protein, 124 aa, synthetic construct
  REGION 1..124: note = source = /note="Description of Artificial Sequence: Synthetic polypeptide"
EVQLVETGGGLVQPGGSLRLSCAASGFTFSSYAMSWVRQAPGKGLEWVSAISGSGGSTYYADSVKGRFTMSRENDKNSVFLQMNSLRVEDTGVYYCARANYKRELRYYYGMDVWGQGTMVTVSS

SEQ ID NO: 767 - protein, 109 aa, synthetic construct
  REGION 1..109: note = source = /note="Description of Artificial Sequence: Synthetic polypeptide"
EIVMTQSPGTLSLSPGESATLSCRASQRVASNYLAWYQHKPGQAPSLLISGASSRATGVPDRFSGSGSGTDFTLAISRLEPEDSAVYYCQHYDSSPSWTFGQGTKVEIK

SEQ ID NO: 768 - protein, 492 aa, synthetic construct
  REGION 1..492: note = source = /note="Description of Artificial Sequence: Synthetic polypeptide"
MALPVTALLLPLALLLHAARPEVQLVETGGGLVQPGGSLRLSCAASGFTFSSYAMSWVRQAPGKGLEWVSAISGSGGSTYYADSVKGRFTMSRENDKNSVFLQMNSLRVEDTGVYYCARANYKRELRYYYGMDVWGQGTMVTVSSGGGGSGGGGSGGGGSEIVMTQSPGTLSLSPGESATLSCRASQRVASNYLAWYQHKPGQAPSLLISGASSRATGVPDRFSGSGSGTDFTLAISRLEPEDSAVYYCQHYDSSPSWTFGQGTKVEIKTTTPAPRPPTPAPTIASQPLSLRPEACRPAAGGAVHTRGLDFACDIYIWAPLAGTCGVLLLSLVITLYCKRGRKKLLYIFKQPFMRPVQTTQEEDGCSCRFPEEEEGGCELRVKFSRSADAPAYKQGQNQLYNELNLGRREEYDVLDKRRGRDPEMGGKPRRKNPQEGLYNELQKDKMAEAYSEIGMKGERRRGKGHDGLYQGLSTATKDTYDALHMQALPPR

SEQ ID NO: 769 - DNA, 1476 bp, synthetic construct
  misc_feature 1..1476: note = source = /note="Description of Artificial Sequence: Synthetic polynucleotide"
  source 1..1476: mol_type = other DNA
atggccctccctgtcaccgccctgctgcttccgctggctcttctgctccacgccgctcggcccgaagtgcaactggtggaaaccggtggaggactcgtgcagcctggcggcagcctccggctgagctgcgccgcttcgggattcaccttttcctcctacgcgatgtcttgggtcagacaggcccccggaaaggggctggaatgggtgtcagccatctccggctccggcggatcaacgtactacgccgactccgtgaaaggccggttcaccatgtcgcgcgagaatgacaagaactccgtgttcctgcaaatgaactccctgagggtggaggacaccggagtgtactattgtgcgcgcgccaactacaagagagagctgcggtactactacggaatggacgtctggggacagggaactatggtgaccgtgtcatccggtggagggggaagcggcggtggaggcagcgggggcgggggttcagaaattgtcatgacccagtccccgggaactctttccctctcccccggggaatccgcgactttgtcctgccgggccagccagcgcgtggcctcgaactacctcgcatggtaccagcataagccaggccaagccccttccctgctgatttccggggctagcagccgcgccactggcgtgccggataggttctcgggaagcggctcgggtaccgatttcaccctggcaatctcgcggctggaaccggaggattcggccgtgtactactgccagcactatgactcatccccctcctggacattcggacagggcaccaaggtcgagatcaagaccactaccccagcaccgaggccacccaccccggctcctaccatcgcctcccagcctctgtccctgcgtccggaggcatgtagacccgcagctggtggggccgtgcatacccggggtcttgacttcgcctgcgatatctacatttgggcccctctggctggtacttgcggggtcctgctgctttcactcgtgatcactctttactgtaagcgcggtcggaagaagctgctgtacatctttaagcaacccttcatgaggcctgtgcagactactcaagaggaggacggctgttcatgccggttcccagaggaggaggaaggcggctgcgaactgcgcgtgaaattcagccgcagcgcagatgctccagcctacaagcaggggcagaaccagctctacaacgaactcaatcttggtcggagagaggagtacgacgtgctggacaagcggagaggacgggacccagaaatgggcgggaagccgcgcagaaagaatccccaagagggcctgtacaacgagctccaaaaggataagatggcagaagcctatagcgagattggtatgaaaggggaacgcagaagaggcaaaggccacgacggactgtaccagggactcagcaccgccaccaaggacacctatgacgctcttcacatgcaggccctgccgcctcgg

SEQ ID NO: 770 - protein, 244 aa, synthetic construct
  REGION 1..244: note = source = /note="Description of Artificial Sequence: Synthetic polypeptide"
EVQLLETGGGLVQPGGSLRLSCAASGFSFSSYAMSWVRQAPGKGLEWVSAISGSGGSTYYADSVKGRFTISRDNSKNTLYLQMNSLRAEDTAVYYCAKALVGATGAFDIWGQGTLVTVSSGGGGSGGGGSGGGGSEIVLTQSPGTLSLSPGERATLSCRASQSLSSNFLAWYQQKPGQAPGLLIYGASNWATGTPDRFSGSGSGTDFTLTITRLEPEDFAVYYCQYYGTSPMYTFGQGTKVEIK

SEQ ID NO: 771 - DNA, 732 bp, synthetic construct
  misc_feature 1..732: note = source = /note="Description of Artificial Sequence: Synthetic polynucleotide"
  source 1..732: mol_type = other DNA
gaagtgcagctgctcgaaaccggtggagggctggtgcagccagggggctccctgaggctttcatgcgccgctagcggattctccttctcctcttacgccatgtcgtgggtccgccaagcccctggaaaaggcctggaatgggtgtccgcgatttccgggagcggaggttcgacctattacgccgactccgtgaagggccgctttaccatctcccgggataactccaagaacactctgtacctccaaatgaactcgctgagagccgaggacaccgccgtgtattactgcgcgaaggcgctggtcggcgcgactggggcattcgacatctggggacagggaactcttgtgaccgtgtcgagcggaggcggcggctccggcggaggagggagcgggggcggtggttccgaaatcgtgttgactcagtccccgggaaccctgagcttgtcacccggggagcgggccactctctcctgtcgcgcctcccaatcgctctcatccaatttcctggcctggtaccagcagaagcccggacaggccccgggcctgctcatctacggcgcttcaaactgggcaacgggaacccctgatcggttcagcggaagcggatcgggtactgactttaccctgaccatcaccagactggaaccggaggacttcgccgtgtactactgccagtactacggcacctcccccatgtacacattcggacagggtaccaaggtcgagattaag

SEQ ID NO: 772 - protein, 120 aa, synthetic construct
  REGION 1..120: note = source = /note="Description of Artificial Sequence: Synthetic polypeptide"
EVQLLETGGGLVQPGGSLRLSCAASGFSFSSYAMSWVRQAPGKGLEWVSAISGSGGSTYYADSVKGRFTISRDNSKNTLYLQMNSLRAEDTAVYYCAKALVGATGAFDIWGQGTLVTVSS

SEQ ID NO: 773 - protein, 109 aa, synthetic construct
  REGION 1..109: note = source = /note="Description of Artificial Sequence: Synthetic polypeptide"
EIVLTQSPGTLSLSPGERATLSCRASQSLSSNFLAWYQQKPGQAPGLLIYGASNWATGTPDRFSGSGSGTDFTLTITRLEPEDFAVYYCQYYGTSPMYTFGQGTKVEIK

SEQ ID NO: 774 - protein, 488 aa, synthetic construct
  REGION 1..488: note = source = /note="Description of Artificial Sequence: Synthetic polypeptide"
MALPVTALLLPLALLLHAARPEVQLLETGGGLVQPGGSLRLSCAASGFSFSSYAMSWVRQAPGKGLEWVSAISGSGGSTYYADSVKGRFTISRDNSKNTLYLQMNSLRAEDTAVYYCAKALVGATGAFDIWGQGTLVTVSSGGGGSGGGGSGGGGSEIVLTQSPGTLSLSPGERATLSCRASQSLSSNFLAWYQQKPGQAPGLLIYGASNWATGTPDRFSGSGSGTDFTLTITRLEPEDFAVYYCQYYGTSPMYTFGQGTKVEIKTTTPAPRPPTPAPTIASQPLSLRPEACRPAAGGAVHTRGLDFACDIYIWAPLAGTCGVLLLSLVITLYCKRGRKKLLYIFKQPFMRPVQTTQEEDGCSCRFPEEEEGGCELRVKFSRSADAPAYKQGQNQLYNELNLGRREEYDVLDKRRGRDPEMGGKPRRKNPQEGLYNELQKDKMAEAYSEIGMKGERRRGKGHDGLYQGLSTATKDTYDALHMQALPPR

SEQ ID NO: 775 - DNA, 1464 bp, synthetic construct
  misc_feature 1..1464: note = source = /note="Description of Artificial Sequence: Synthetic polynucleotide"
  source 1..1464: mol_type = other DNA
atggccctccctgtcaccgccctgctgcttccgctggctcttctgctccacgccgctcggcccgaagtgcagctgctcgaaaccggtggagggctggtgcagccagggggctccctgaggctttcatgcgccgctagcggattctccttctcctcttacgccatgtcgtgggtccgccaagcccctggaaaaggcctggaatgggtgtccgcgatttccgggagcggaggttcgacctattacgccgactccgtgaagggccgctttaccatctcccgggataactccaagaacactctgtacctccaaatgaactcgctgagagccgaggacaccgccgtgtattactgcgcgaaggcgctggtcggcgcgactggggcattcgacatctggggacagggaactcttgtgaccgtgtcgagcggaggcggcggctccggcggaggagggagcgggggcggtggttccgaaatcgtgttgactcagtccccgggaaccctgagcttgtcacccggggagcgggccactctctcctgtcgcgcctcccaatcgctctcatccaatttcctggcctggtaccagcagaagcccggacaggccccgggcctgctcatctacggcgcttcaaactgggcaacgggaacccctgatcggttcagcggaagcggatcgggtactgactttaccctgaccatcaccagactggaaccggaggacttcgccgtgtactactgccagtactacggcacctcccccatgtacacattcggacagggtaccaaggtcgagattaagaccactaccccagcaccgaggccacccaccccggctcctaccatcgcctcccagcctctgtccctgcgtccggaggcatgtagacccgcagctggtggggccgtgcatacccggggtcttgacttcgcctgcgatatctacatttgggcccctctggctggtacttgcggggtcctgctgctttcactcgtgatcactctttactgtaagcgcggtcggaagaagctgctgtacatctttaagcaacccttcatgaggcctgtgcagactactcaagaggaggacggctgttcatgccggttcccagaggaggaggaaggcggctgcgaactgcgcgtgaaattcagccgcagcgcagatgctccagcctacaagcaggggcagaaccagctctacaacgaactcaatcttggtcggagagaggagtacgacgtgctggacaagcggagaggacgggacccagaaatgggcgggaagccgcgcagaaagaatccccaagagggcctgtacaacgagctccaaaaggataagatggcagaagcctatagcgagattggtatgaaaggggaacgcagaagaggcaaaggccacgacggactgtaccagggactcagcaccgccaccaaggacacctatgacgctcttcacatgcaggccctgccgcctcgg

SEQ ID NO: 776 - protein, 244 aa, synthetic construct
  REGION 1..244: note = source = /note="Description of Artificial Sequence: Synthetic polypeptide"
EVQLLESGGGLVQPGGSLRLSCAASGFTFSSYAMSWVRQAPGKGLEWVSAISGSGGSTYYADSVKGRFTISRDNSKNTLYLQMNSLRAEDTAVYYCVLWFGEGFDPWGQGTLVTVSSGGGGSGGGGSGGGGSDIVLTQSPLSLPVTPGEPASISCRSSQSLLHSNGYNYLDWYLQKPGQSPQLLIYLGSNRASGVPDRFSGSGSGTDFTLKISRVEAEDVGVYYCMQALQTPLTFGGGTKVDIK

SEQ ID NO: 777 - DNA, 733 bp, synthetic construct
  misc_feature 1..733: note = source = /note="Description of Artificial Sequence: Synthetic polynucleotide"
  source 1..733: mol_type = other DNA
gaagtgcagctgcttgagagcggtggaggtctggtgcagcccgggggatcactgcgcctgtcctgtgccgcgtccggtttcactttctcctcgtacgccatgtcgtgggtcagacaggcaccgggaaagggactggaatgggtgtcagccatttcgggttcggggggcagcacctactacgctgactccgtgaagggccggttcaccatttcccgcgacaactccaagaacaccttgtacctccaaatgaactccctgcgggccgaagataccgccgtgtattactgcgtgctgtggttcggagagggattcgacccgtggggacaaggaacactcgtgactgtgtcatccggcggaggcggcagcggtggcggcggttccggcggcggcggatctgacatcgtgttgacccagtcccctctgagcctgccggtcactcctggcgaaccagccagcatctcctgccggtcgagccagtccctcctgcactccaatgggtacaactacctcgattggtatctgcaaaagccgggccagagcccccagctgctgatctaccttgggtcaaaccgcgcttccggggtgcctgatagattctccgggtccgggagcggaaccgactttaccctgaaaatctcgagggtggaggccgaggacgtcggagtgtactactgcatgcaggcgctccagactcccctgaccttcggaggaggaacgaaggtcgacatcaaga

SEQ ID NO: 778 - protein, 117 aa, synthetic construct
  REGION 1..117: note = source = /note="Description of Artificial Sequence: Synthetic polypeptide"
EVQLLESGGGLVQPGGSLRLSCAASGFTFSSYAMSWVRQAPGKGLEWVSAISGSGGSTYYADSVKGRFTISRDNSKNTLYLQMNSLRAEDTAVYYCVLWFGEGFDPWGQGTLVTVSS

SEQ ID NO: 779 - protein, 112 aa, synthetic construct
  REGION 1..112: note = source = /note="Description of Artificial Sequence: Synthetic polypeptide"
DIVLTQSPLSLPVTPGEPASISCRSSQSLLHSNGYNYLDWYLQKPGQSPQLLIYLGSNRASGVPDRFSGSGSGTDFTLKISRVEAEDVGVYYCMQALQTPLTFGGGTKVDIK

SEQ ID NO: 780 - protein, 488 aa, synthetic construct
  REGION 1..488: note = source = /note="Description of Artificial Sequence: Synthetic polypeptide"
MALPVTALLLPLALLLHAARPEVQLLESGGGLVQPGGSLRLSCAASGFTFSSYAMSWVRQAPGKGLEWVSAISGSGGSTYYADSVKGRFTISRDNSKNTLYLQMNSLRAEDTAVYYCVLWFGEGFDPWGQGTLVTVSSGGGGSGGGGSGGGGSDIVLTQSPLSLPVTPGEPASISCRSSQSLLHSNGYNYLDWYLQKPGQSPQLLIYLGSNRASGVPDRFSGSGSGTDFTLKISRVEAEDVGVYYCMQALQTPLTFGGGTKVDIKTTTPAPRPPTPAPTIASQPLSLRPEACRPAAGGAVHTRGLDFACDIYIWAPLAGTCGVLLLSLVITLYCKRGRKKLLYIFKQPFMRPVQTTQEEDGCSCRFPEEEEGGCELRVKFSRSADAPAYKQGQNQLYNELNLGRREEYDVLDKRRGRDPEMGGKPRRKNPQEGLYNELQKDKMAEAYSEIGMKGERRRGKGHDGLYQGLSTATKDTYDALHMQALPPR

SEQ ID NO: 781 - DNA, 1464 bp, synthetic construct
  misc_feature 1..1464: note = source = /note="Description of Artificial Sequence: Synthetic polynucleotide"
  source 1..1464: mol_type = other DNA
atggccctccctgtcaccgccctgctgcttccgctggctcttctgctccacgccgctcggcccgaagtgcagctgcttgagagcggtggaggtctggtgcagcccgggggatcactgcgcctgtcctgtgccgcgtccggtttcactttctcctcgtacgccatgtcgtgggtcagacaggcaccgggaaagggactggaatgggtgtcagccatttcgggttcggggggcagcacctactacgctgactccgtgaagggccggttcaccatttcccgcgacaactccaagaacaccttgtacctccaaatgaactccctgcgggccgaagataccgccgtgtattactgcgtgctgtggttcggagagggattcgacccgtggggacaaggaacactcgtgactgtgtcatccggcggaggcggcagcggtggcggcggttccggcggcggcggatctgacatcgtgttgacccagtcccctctgagcctgccggtcactcctggcgaaccagccagcatctcctgccggtcgagccagtccctcctgcactccaatgggtacaactacctcgattggtatctgcaaaagccgggccagagcccccagctgctgatctaccttgggtcaaaccgcgcttccggggtgcctgatagattctccgggtccgggagcggaaccgactttaccctgaaaatctcgagggtggaggccgaggacgtcggagtgtactactgcatgcaggcgctccagactcccctgaccttcggaggaggaacgaaggtcgacatcaagaccactaccccagcaccgaggccacccaccccggctcctaccatcgcctcccagcctctgtccctgcgtccggaggcatgtagacccgcagctggtggggccgtgcatacccggggtcttgacttcgcctgcgatatctacatttgggcccctctggctggtacttgcggggtcctgctgctttcactcgtgatcactctttactgtaagcgcggtcggaagaagctgctgtacatctttaagcaacccttcatgaggcctgtgcagactactcaagaggaggacggctgttcatgccggttcccagaggaggaggaaggcggctgcgaactgcgcgtgaaattcagccgcagcgcagatgctccagcctacaagcaggggcagaaccagctctacaacgaactcaatcttggtcggagagaggagtacgacgtgctggacaagcggagaggacgggacccagaaatgggcgggaagccgcgcagaaagaatccccaagagggcctgtacaacgagctccaaaaggataagatggcagaagcctatagcgagattggtatgaaaggggaacgcagaagaggcaaaggccacgacggactgtaccagggactcagcaccgccaccaaggacacctatgacgctcttcacatgcaggccctgccgcctcgg

SEQ ID NO: 782 - protein, 251 aa, synthetic construct
  REGION 1..251: note = source = /note="Description of Artificial Sequence: Synthetic polypeptide"
QVQLVESGGGLVQPGGSLRLSCAASGFTFSSYAMSWVRQAPGKGLEWVSAISGSGGSTYYADSVKGRFTISRDNSKNTLYLQMNSLRAEDTAVYYCAKVGYDSSGYYRDYYGMDVWGQGTTVTVSSGGGGSGGGGSGGGGSEIVLTQSPGTLSLSPGERATLSCRASQSVSSSYLAWYQQKPGQAPRLLIYGTSSRATGISDRFSGSGSGTDFTLTISRLEPEDFAVYYCQHYGNSPPKFTFGPGTKLEIK

SEQ ID NO: 783 - DNA, 753 bp, synthetic construct
  misc_feature 1..753: note = source = /note="Description of Artificial Sequence: Synthetic polynucleotide"
  source 1..753: mol_type = other DNA
caagtgcagctcgtggagtcaggcggaggactggtgcagcccgggggctccctgagactttcctgcgcggcatcgggttttaccttctcctcctatgctatgtcctgggtgcgccaggccccgggaaagggactggaatgggtgtccgcaatcagcggtagcgggggctcaacatactacgccgactccgtcaagggtcgcttcactatttcccgggacaactccaagaataccctgtacctccaaatgaacagcctcagggccgaggatactgccgtgtactactgcgccaaagtcggatacgatagctccggttactaccgggactactacggaatggacgtgtggggacagggcaccaccgtgaccgtgtcaagcggcggaggcggttcaggagggggaggctccggcggtggagggtccgaaatcgtcctgactcagtcgcctggcactctgtcgttgtccccgggggagcgcgctaccctgtcgtgtcgggcgtcgcagtccgtgtcgagctcctacctcgcgtggtaccagcagaagcccggacaggcccctagacttctgatctacggcacttcttcacgcgccaccgggatcagcgacaggttcagcggctccggctccgggaccgacttcaccctgaccattagccggctggagcctgaagatttcgccgtgtattactgccaacactacggaaactcgccgccaaagttcacgttcggacccggaaccaagctggaaatcaag

SEQ ID NO: 784 - protein, 126 aa, synthetic construct
  REGION 1..126: note = source = /note="Description of Artificial Sequence: Synthetic polypeptide"
QVQLVESGGGLVQPGGSLRLSCAASGFTFSSYAMSWVRQAPGKGLEWVSAISGSGGSTYYADSVKGRFTISRDNSKNTLYLQMNSLRAEDTAVYYCAKVGYDSSGYYRDYYGMDVWGQGTTVTVSS

SEQ ID NO: 785 - protein, 110 aa, synthetic construct
  REGION 1..110: note = source = /note="Description of Artificial Sequence: Synthetic polypeptide"
EIVLTQSPGTLSLSPGERATLSCRASQSVSSSYLAWYQQKPGQAPRLLIYGTSSRATGISDRFSGSGSGTDFTLTISRLEPEDFAVYYCQHYGNSPPKFTFGPGTKLEIK

SEQ ID NO: 786 - protein, 495 aa, synthetic construct
  REGION 1..495: note = source = /note="Description of Artificial Sequence: Synthetic polypeptide"
MALPVTALLLPLALLLHAARPQVQLVESGGGLVQPGGSLRLSCAASGFTFSSYAMSWVRQAPGKGLEWVSAISGSGGSTYYADSVKGRFTISRDNSKNTLYLQMNSLRAEDTAVYYCAKVGYDSSGYYRDYYGMDVWGQGTTVTVSSGGGGSGGGGSGGGGSEIVLTQSPGTLSLSPGERATLSCRASQSVSSSYLAWYQQKPGQAPRLLIYGTSSRATGISDRFSGSGSGTDFTLTISRLEPEDFAVYYCQHYGNSPPKFTFGPGTKLEIKTTTPAPRPPTPAPTIASQPLSLRPEACRPAAGGAVHTRGLDFACDIYIWAPLAGTCGVLLLSLVITLYCKRGRKKLLYIFKQPFMRPVQTTQEEDGCSCRFPEEEEGGCELRVKFSRSADAPAYKQGQNQLYNELNLGRREEYDVLDKRRGRDPEMGGKPRRKNPQEGLYNELQKDKMAEAYSEIGMKGERRRGKGHDGLYQGLSTATKDTYDALHMQALPPR

SEQ ID NO: 787 - DNA, 1485 bp, synthetic construct
  misc_feature 1..1485: note = source = /note="Description of Artificial Sequence: Synthetic polynucleotide"
  source 1..1485: mol_type = other DNA
atggccctccctgtcaccgccctgctgcttccgctggctcttctgctccacgccgctcggccccaagtgcagctcgtggagtcaggcggaggactggtgcagcccgggggctccctgagactttcctgcgcggcatcgggttttaccttctcctcctatgctatgtcctgggtgcgccaggccccgggaaagggactggaatgggtgtccgcaatcagcggtagcgggggctcaacatactacgccgactccgtcaagggtcgcttcactatttcccgggacaactccaagaataccctgtacctccaaatgaacagcctcagggccgaggatactgccgtgtactactgcgccaaagtcggatacgatagctccggttactaccgggactactacggaatggacgtgtggggacagggcaccaccgtgaccgtgtcaagcggcggaggcggttcaggagggggaggctccggcggtggagggtccgaaatcgtcctgactcagtcgcctggcactctgtcgttgtccccgggggagcgcgctaccctgtcgtgtcgggcgtcgcagtccgtgtcgagctcctacctcgcgtggtaccagcagaagcccggacaggcccctagacttctgatctacggcacttcttcacgcgccaccgggatcagcgacaggttcagcggctccggctccgggaccgacttcaccctgaccattagccggctggagcctgaagatttcgccgtgtattactgccaacactacggaaactcgccgccaaagttcacgttcggacccggaaccaagctggaaatcaagaccactaccccagcaccgaggccacccaccccggctcctaccatcgcctcccagcctctgtccctgcgtccggaggcatgtagacccgcagctggtggggccgtgcatacccggggtcttgacttcgcctgcgatatctacatttgggcccctctggctggtacttgcggggtcctgctgctttcactcgtgatcactctttactgtaagcgcggtcggaagaagctgctgtacatctttaagcaacccttcatgaggcctgtgcagactactcaagaggaggacggctgttcatgccggttcccagaggaggaggaaggcggctgcgaactgcgcgtgaaattcagccgcagcgcagatgctccagcctacaagcaggggcagaaccagctctacaacgaactcaatcttggtcggagagaggagtacgacgtgctggacaagcggagaggacgggacccagaaatgggcgggaagccgcgcagaaagaatccccaagagggcctgtacaacgagctccaaaaggataagatggcagaagcctatagcgagattggtatgaaaggggaacgcagaagaggcaaaggccacgacggactgtaccagggactcagcaccgccaccaaggacacctatgacgctcttcacatgcaggccctgccgcctcgg

SEQ ID NO: 788 - protein, 246 aa, synthetic construct
  REGION 1..246: note = source = /note="Description of Artificial Sequence: Synthetic polypeptide"
EVQLVESGGGLVQPGGSLRLSCAASGFTFSSYAMSWVRQAPGKGLEWVSAISGSGGSTYYADSVKGRFTISRDNSKNTLYLQMNSLRAEDTAVYYCAKMGWSSGYLGAFDIWGQGTTVTVSSGGGGSGGGGSGGGGSEIVLTQSPGTLSLSPGERATLSCRASQSVASSFLAWYQQKPGQAPRLLIYGASGRATGIPDRFSGSGSGTDFTLTISRLEPEDFAVYYCQHYGGSPRLTFGGGTKVDIK

SEQ ID NO: 789 - DNA, 739 bp, synthetic construct
  misc_feature 1..739: note = source = /note="Description of Artificial Sequence: Synthetic polynucleotide"
  source 1..739: mol_type = other DNA
gaagtccaactggtggagtccgggggagggctcgtgcagcccggaggcagccttcggctgtcgtgcgccgcctccgggttcacgttctcatcctacgcgatgtcgtgggtcagacaggcaccaggaaagggactggaatgggtgtccgccattagcggctccggcggtagcacctactatgccgactcagtgaagggaaggttcactatctcccgcgacaacagcaagaacaccctgtacctccaaatgaactctctgcgggccgaggataccgcggtgtactattgcgccaagatgggttggtccagcggatacttgggagccttcgacatttggggacagggcactactgtgaccgtgtcctccgggggtggcggatcgggaggcggcggctcgggtggagggggttccgaaatcgtgttgacccagtcaccgggaaccctctcgctgtccccgggagaacgggctacactgtcatgtagagcgtcccagtccgtggcttcctcgttcctggcctggtaccagcagaagccgggacaggcaccccgcctgctcatctacggagccagcggccgggcgaccggcatccctgaccgcttctccggttccggctcgggcaccgactttactctgaccattagcaggcttgagcccgaggattttgccgtgtactactgccaacactacggggggagccctcgcctgaccttcggaggcggaactaaggtcgatatcaaaa

SEQ ID NO: 790 - protein, 122 aa, synthetic construct
  REGION 1..122: note = source = /note="Description of Artificial Sequence: Synthetic polypeptide"
EVQLVESGGGLVQPGGSLRLSCAASGFTFSSYAMSWVRQAPGKGLEWVSAISGSGGSTYYADSVKGRFTISRDNSKNTLYLQMNSLRAEDTAVYYCAKMGWSSGYLGAFDIWGQGTTVTVSS

SEQ ID NO: 791 - protein, 109 aa, synthetic construct
  REGION 1..109: note = source = /note="Description of Artificial Sequence: Synthetic polypeptide"
EIVLTQSPGTLSLSPGERATLSCRASQSVASSFLAWYQQKPGQAPRLLIYGASGRATGIPDRFSGSGSGTDFTLTISRLEPEDFAVYYCQHYGGSPRLTFGGGTKVDIK

SEQ ID NO: 792 - protein, 490 aa, synthetic construct
  REGION 1..490: note = source = /note="Description of Artificial Sequence: Synthetic polypeptide"
MALPVTALLLPLALLLHAARPEVQLVESGGGLVQPGGSLRLSCAASGFTFSSYAMSWVRQAPGKGLEWVSAISGSGGSTYYADSVKGRFTISRDNSKNTLYLQMNSLRAEDTAVYYCAKMGWSSGYLGAFDIWGQGTTVTVSSGGGGSGGGGSGGGGSEIVLTQSPGTLSLSPGERATLSCRASQSVASSFLAWYQQKPGQAPRLLIYGASGRATGIPDRFSGSGSGTDFTLTISRLEPEDFAVYYCQHYGGSPRLTFGGGTKVDIKTTTPAPRPPTPAPTIASQPLSLRPEACRPAAGGAVHTRGLDFACDIYIWAPLAGTCGVLLLSLVITLYCKRGRKKLLYIFKQPFMRPVQTTQEEDGCSCRFPEEEEGGCELRVKFSRSADAPAYKQGQNQLYNELNLGRREEYDVLDKRRGRDPEMGGKPRRKNPQEGLYNELQKDKMAEAYSEIGMKGERRRGKGHDGLYQGLSTATKDTYDALHMQALPPR

SEQ ID NO: 793 - DNA, 1470 bp, synthetic construct
  misc_feature 1..1470: note = source = /note="Description of Artificial Sequence: Synthetic polynucleotide"
  source 1..1470: mol_type = other DNA
atggccctccctgtcaccgccctgctgcttccgctggctcttctgctccacgccgctcggcccgaagtccaactggtggagtccgggggagggctcgtgcagcccggaggcagccttcggctgtcgtgcgccgcctccgggttcacgttctcatcctacgcgatgtcgtgggtcagacaggcaccaggaaagggactggaatgggtgtccgccattagcggctccggcggtagcacctactatgccgactcagtgaagggaaggttcactatctcccgcgacaacagcaagaacaccctgtacctccaaatgaactctctgcgggccgaggataccgcggtgtactattgcgccaagatgggttggtccagcggatacttgggagccttcgacatttggggacagggcactactgtgaccgtgtcctccgggggtggcggatcgggaggcggcggctcgggtggagggggttccgaaatcgtgttgacccagtcaccgggaaccctctcgctgtccccgggagaacgggctacactgtcatgtagagcgtcccagtccgtggcttcctcgttcctggcctggtaccagcagaagccgggacaggcaccccgcctgctcatctacggagccagcggccgggcgaccggcatccctgaccgcttctccggttccggctcgggcaccgactttactctgaccattagcaggcttgagcccgaggattttgccgtgtactactgccaacactacggggggagccctcgcctgaccttcggaggcggaactaaggtcgatatcaaaaccactaccccagcaccgaggccacccaccccggctcctaccatcgcctcccagcctctgtccctgcgtccggaggcatgtagacccgcagctggtggggccgtgcatacccggggtcttgacttcgcctgcgatatctacatttgggcccctctggctggtacttgcggggtcctgctgctttcactcgtgatcactctttactgtaagcgcggtcggaagaagctgctgtacatctttaagcaacccttcatgaggcctgtgcagactactcaagaggaggacggctgttcatgccggttcccagaggaggaggaaggcggctgcgaactgcgcgtgaaattcagccgcagcgcagatgctccagcctacaagcaggggcagaaccagctctacaacgaactcaatcttggtcggagagaggagtacgacgtgctggacaagcggagaggacgggacccagaaatgggcgggaagccgcgcagaaagaatccccaagagggcctgtacaacgagctccaaaaggataagatggcagaagcctatagcgagattggtatgaaaggggaacgcagaagaggcaaaggccacgacggactgtaccagggactcagcaccgccaccaaggacacctatgacgctcttcacatgcaggccctgccgcctcgg

SEQ ID NO: 794 - protein, 121 aa, synthetic construct
  REGION 1..121: note = source = /note="Description of Artificial Sequence: Synthetic polypeptide"
QVQLVQSGAEVKKPGSSVKVSCKASGGTFSNYWMHWVRQAPGQGLEWMGATYRGHSDTYYNQKFKGRVTITADKSTSTAYMELSSLRSEDTAVYYCARGAIYDGYDVLDNWGQGTLVTVSS

SEQ ID NO: 795 - protein, 108 aa, synthetic construct
  REGION 1..108: note = source = /note="Description of Artificial Sequence: Synthetic polypeptide"
DIQMTQSPSSLSASVGDRVTITCSASQDISNYLNWYQQKPGKAPKLLIYYTSNLHSGVPSRFSGSGSGTDFTLTISSLQPEDFATYYCQQYRKLPWTFGQGTKLEIKR

SEQ ID NO: 796 - protein, 451 aa, synthetic construct
  VARIANT 451: note = /replace=" "
  SITE 1..451: note = /note="Variant residues given in the sequence have no preference with respect to those in the annotations for variant positions"
  REGION 1..451: note = source = /note="Description of Artificial Sequence: Synthetic polypeptide"
QVQLVQSGAEVKKPGSSVKVSCKASGGTFSNYWMHWVRQAPGQGLEWMGATYRGHSDTYYNQKFKGRVTITADKSTSTAYMELSSLRSEDTAVYYCARGAIYNGYDVLDNWGQGTLVTVSSASTKGPSVFPLAPSSKSTSGGTAALGCLVKDYFPEPVTVSWNSGALTSGVHTFPAVLQSSGLYSLSSVVTVPSSSLGTQTYICNVNHKPSNTKVDKRVEPKSCDKTHTCPPCPAPELLGGPSVFLFPPKPKDTLMISRTPEVTCVVVAVSHEDPEVKFNWYVDGVEVHNAKTKPREEQYNSTYRVVSVLTVLHQDWLNGKEYKCKVSNKALAAPIEKTISKAKGQPREPQVCTLPPSREEMTKNQVSLSCAVKGFYPSDIAVEWESNGQPENNYKTTPPVLDSDGSFFLVSKLTVDKSRWQQGNVFSCSVMHEALHNHYTQKSLSLSPGK

SEQ ID NO: 797 - protein, 214 aa, synthetic construct
  REGION 1..214: note = source = /note="Description of Artificial Sequence: Synthetic polypeptide"
DIQMTQSPSSLSASVGDRVTITCSASQDISNYLNWYQQKPGKAPKLLIYYTSNLHSGVPSRFSGSGSGTDFTLTISSLQPEDFATYYCQQYRKLPWTFGQGTKLEIKRTVAAPSVFIFPPSDEQLKSGTASVVCLLNNFYPREAKVQWKVDNALQSGNSQESVTEQDSKDSTYSLSSTLTLSKADYEKHKVYACEVTHQGLSSPVTKSFNRGEC

SEQ ID NO: 798 - protein, 119 aa, synthetic construct
  REGION 1..119: note = source = /note="Description of Artificial Sequence: Synthetic polypeptide"
EVQLLESGGGLVQPGGSLRLSCAASGFTFSSYAMSWVRQAPGKGLEWVSAISGSGGSTYYADSVKGRFTISRDNSKNTLYLQMNSLRAEDTAVYYCAKVAPYFAPFDYWGQGTLVTVSS

SEQ ID NO: 799 - protein, 109 aa, synthetic construct
  REGION 1..109: note = source = /note="Description of Artificial Sequence: Synthetic polypeptide"
EIVLTQSPGTLSLSPGERATLSCRASQSVSSSYLAWYQQKPGQAPRLLIYGASSRATGIPDRFSGSGSGTDFTLTISRLEPEDFAVYYCQQYGNPPLYTFGQGTKVEIK

SEQ ID NO: 800 - protein, 449 aa, synthetic construct
  VARIANT 449: note = /replace=" "
  SITE 1..449: note = /note="Variant residues given in the sequence have no preference with respect to those in the annotations for variant positions"
  REGION 1..449: note = source = /note="Description of Artificial Sequence: Synthetic polypeptide"
EVQLLESGGGLVQPGGSLRLSCAASGFTFSSYAMSWVRQAPGKGLEWVSAISGSGGSTYYADSVKGRFTISRDNSKNTLYLQMNSLRAEDTAVYYCAKVAPYFAPFDYWGQGTLVTVSSASTKGPSVFPLAPSSKSTSGGTAALGCLVKDYFPEPVTVSWNSGALTSGVHTFPAVLQSSGLYSLSSVVTVPSSSLGTQTYICNVNHKPSNTKVDKRVEPKSCDKTHTCPPCPAPELLGGPSVFLFPPKPKDTLMISRTPEVTCVVVDVSHEDPEVKFNWYVDGVEVHNAKTKPREEQYASTYRVVSVLTVLHQDWLNGKEYKCKVSNKALPAPIEKTISKAKGQPREPQVCTLPPSREEMTKNQVSLSCAVKGFYPSDIAVEWESNGQPENNYKTTPPVLDSDGSFFLVSKLTVDKSRWQQGNVFSCSVMHEALHNHYTQKSLSLSPGK

SEQ ID NO: 801 - protein, 216 aa, synthetic construct
  REGION 1..216: note = source = /note="Description of Artificial Sequence: Synthetic polypeptide"
EIVLTQSPGTLSLSPGERATLSCRASQSVSSSYLAWYQQKPGQAPRLLIYGASSRATGIPDRFSGSGSGTDFTLTISRLEPEDFAVYYCQQYGNPPLYTFGQGTKVEIKRTVAAPSVFIFPPSDEQLKSGTASVVCLLNNFYPREAKVQWKVDNALQSGNSQESVTEQDSKDSTYSLSSTLTLSKADYEKHKVYACEVTHQGLSSPVTKSFNRGEC

SEQ ID NO: 802 - protein, 117 aa, synthetic construct
  REGION 1..117: note = source = /note="Description of Artificial Sequence: Synthetic polypeptide"
QIQLVQSGPELKKPGETVKISCKASGYTFTDYSINWVKRAPGKGLKWMGWINTETREPAYAYDFRGRFAFSLETSASTAYLQINNLKYEDTATYFCALDYSYAMDYWGQGTSVTVSS

SEQ ID NO: 803 - protein, 111 aa, synthetic construct
  REGION 1..111: note = source = /note="Description of Artificial Sequence: Synthetic polypeptide"
DIVLTQSPPSLAMSLGKRATISCRASESVTILGSHLIHWYQQKPGQPPTLLIQLASNVQTGVPARFSGSGSRTDFTLTIDPVEEDDVAVYYCLQSRTIPRTFGGGTKLEIK

SEQ ID NO: 804 - protein, 447 aa, synthetic construct
  VARIANT 447: note = /replace=" "
  SITE 1..447: note = /note="Variant residues given in the sequence have no preference with respect to those in the annotations for variant positions"
  REGION 1..447: note = source = /note="Description of Artificial Sequence: Synthetic polypeptide"
QIQLVQSGPELKKPGETVKISCKASGYTFTDYSINWVKRAPGKGLKWMGWINTETREPAYAYDFRGRFAFSLETSASTAYLQINNLKYEDTATYFCALDYSYAMDYWGQGTSVTVSSASTKGPSVFPLAPSSKSTSGGTAALGCLVKDYFPEPVTVSWNSGALTSGVHTFPAVLQSSGLYSLSSVVTVPSSSLGTQTYICNVNHKPSNTKVDKRVEPKSCDKTHTCPPCPAPELLGGPSVFLFPPKPKDTLMISRTPEVTCVVVDVSHEDPEVKFNWYVDGVEVHNAKTKPREEQYASTYRVVSVLTVLHQDWLNGKEYKCKVSNKALPAPIEKTISKAKGQPREPQVCTLPPSREEMTKNQVSLSCAVKGFYPSDIAVEWESNGQPENNYKTTPPVLDSDGSFFLVSKLTVDKSRWQQGNVFSCSVMHEALHNHYTQKSLSLSPGK

SEQ ID NO: 805 - protein, 218 aa, synthetic construct
  REGION 1..218: note = source = /note="Description of Artificial Sequence: Synthetic polypeptide"
DIVLTQSPASLAMSLGKRATISCRASESVSVIGAHLIHWYQQKPGQPPKLLIYLASNLETGVPARFSGSGSGTDFTLTIDPVEEDDVAIYSCLQSRIFPRTFGGGTKLEIKRTVAAPSVFIFPPSDEQLKSGTASVVCLLNNFYPREAKVQWKVDNALQSGNSQESVTEQDSKDSTYSLSSTLTLSKADYEKHKVYACEVTHQGLSSPVTKSFNRGEC

SEQ ID NO: 806 - protein, 116 aa, synthetic construct
  REGION 1..116: note = source = /note="Description of Artificial Sequence: Synthetic polypeptide"
EVQLLESGGGLVQPGGSLRLSCAASGFTFSSYAMSWVRQAPGKGLEWVSAISGSGGSTYYADSVKGRFTISRDNSKNTLYLQMNSLRAEDTAVYYCAKVLGWFDYWGQGTLVTVSS

SEQ ID NO: 807 - protein, 109 aa, synthetic construct
  REGION 1..109: note = source = /note="Description of Artificial Sequence: Synthetic polypeptide"
EIVLTQSPGTLSLSPGERATLSCRASQSVSSSYLAWYQQKPGQAPRLLIYGASSRATGIPDRFSGSGSGTDFTLTISRLEPEDFAVYYCQQYGYPPDFTFGQGTKVEIK

SEQ ID NO: 808 - protein, 477 aa, synthetic construct
  VARIANT 477: note = /replace=" "
  SITE 1..477: note = /note="Variant residues given in the sequence have no preference with respect to those in the annotations for variant positions"
  REGION 1..477: note = source = /note="Description of Artificial Sequence: Synthetic polypeptide"
EVQLLESGGGLVQPGGSLRLSCAASGFTFSSYAMSWVRQAPGKGLEWVSAISGSGGSTYYADSVKGRFTISRDNSKNTLYLQMNSLRAEDTAVYYCAKVLGWFDYWGQGTLVTVSSGGGGSGGGGSGGGGSGGGGSEIVLTQSPGTLSLSPGERATLSCRASQSVSSSYLAWYQQKPGQAPRLLIYGASSRATGIPDRFSGSGSGTDFTLTISRLEPEDFAVYYCQQYGYPPDFTFGQGTKVEIKGGGGSDKTHTCPPCPAPELLGGPSVFLFPPKPKDTLMISRTPEVTCVVVAVSHEDPEVKFNWYVDGVEVHNAKTKPREEQYNSTYRVVSVLTVLHQDWLNGKEYKCKVSNKALAAPIEKTISKAKGQPREPQVYTLPPCRDELTKNQVSLWCLVKGFYPSDIAVEWESNGQPENNYKTTPPVLDSDGSFFLYSKLTVDKSRWQQGNVFSCSVMHEALHNHYTQKSLSLSPGK

SEQ ID NO: 809 - protein, 215 aa, synthetic construct
  REGION 1..215: note = source = /note="Description of Artificial Sequence: Synthetic polypeptide"
QAVVTQEPSLTVSPGGTVTLTCGSSTGAVTTSNYANWVQEKPGQAFRGLIGGTNKRAPGTPARFSGSLLGGKAALTLSGAQPEDEAEYYCALWYSNLWVFGGGTKLTVLGQPKAAPSVTLFPPSSEELQANKATLVCLISDFYPGAVTVAWKADSSPVKAGVETTTPSKQSNNKYAASSYLSLTPEQWKSHRSYSCQVTHEGSTVEKTVAPTECS

SEQ ID NO: 810 - protein, 449 aa, synthetic construct
  VARIANT 449: note = /replace=" "
  SITE 1..449: note = /note="Variant residues given in the sequence have no preference with respect to those in the annotations for variant positions"
  REGION 1..449: note = source = /note="Description of Artificial Sequence: Synthetic polypeptide"
EVQLVESGGGLVKPGGSLRLSCAASGFTFSNSGMIWVRQAPGKGLEWVGHIRSKTDGGTTDYAAPVKGRFTISRDDSKNTLYLQMNSLKTEDTAVYYCTTGGSGSFDYWGQGTLVTVSSASTKGPSVFPLAPSSKSTSGGTAALGCLVKDYFPEPVTVSWNSGALTSGVHTFPAVLQSSGLYSLSSVVTVPSSSLGTQTYICNVNHKPSNTKVDKRVEPKSCDKTHTCPPCPAPEAAGGPSVFLFPPKPKDTLMISRTPEVTCVVVDVSHEDPEVKFNWYVDGVEVHNAKTKPREEQYNSTYRVVSVLTVLHQDWLNGKEYKCKVSNKALPAPIEKTISKAKGQPREPQVCTLPPSREEMTKNQVSLSCAVKGFYPSDIAVEWESNGQPENNYKTTPPVLDSDGSFFLVSKLTVDKSRWQQGNVFSCSVMHEALHNHYTQKSLSLSPGK

SEQ ID NO: 811 - protein, 253 aa, synthetic construct
  REGION 1..253: note = source = /note="Description of Artificial Sequence: Synthetic polypeptide"
EVQLQQSGPGLVKPSQTLSLTCAISGDSMLSNSDTWNWIRQSPSRGLEWLGRTYHRSTWYDDYASSVRGRVSINVDTSKNQYSLQLNAVTPEDTGVYYCARVRLQDGNSWSDAFDVWGQGTMVTVSSGGGGSGGGGSGGGGSQSALTQPASASGSPGQSVTISCTGTSSDVGGYNYVSWYQQHPGKAPKLMIYDVSNRPSGVSNRFSGSKSGNTASLTISGLQAEDEADYYCSSYTSSSTLYVFGTGTQLTVL

SEQ ID NO: 812 - protein, 127 aa, synthetic construct
  REGION 1..127: note = source = /note="Description of Artificial Sequence: Synthetic polypeptide"
EVQLQQSGPGLVKPSQTLSLTCAISGDSMLSNSDTWNWIRQSPSRGLEWLGRTYHRSTWYDDYASSVRGRVSINVDTSKNQYSLQLNAVTPEDTGVYYCARVRLQDGNSWSDAFDVWGQGTMVTVSS

SEQ ID NO: 813 - protein, 111 aa, synthetic construct
  REGION 1..111: note = source = /note="Description of Artificial Sequence: Synthetic polypeptide"
QSALTQPASASGSPGQSVTISCTGTSSDVGGYNYVSWYQQHPGKAPKLMIYDVSNRPSGVSNRFSGSKSGNTASLTISGLQAEDEADYYCSSYTSSSTLYVFGTGTQLTVL

SEQ ID NO: 814 - protein, 12 aa, synthetic construct
  REGION 1..12: note = source = /note="Description of Artificial Sequence: Synthetic peptide"
GDSMLSNSDTWN

SEQ ID NO: 815 - protein, 7 aa, synthetic construct
  REGION 1..7: note = source = /note="Description of Artificial Sequence: Synthetic peptide"
SNSDTWN

SEQ ID NO: 816 - protein, 18 aa, synthetic construct
  REGION 1..18: note = source = /note="Description of Artificial Sequence: Synthetic peptide"
RTYHRSTWYDDYASSVRG

SEQ ID NO: 817 - protein, 15 aa, synthetic construct
  REGION 1..15: note = source = /note="Description of Artificial Sequence: Synthetic peptide"
VRLQDGNSWSDAFDV

SEQ ID NO: 818 - protein, 14 aa, synthetic construct
  REGION 1..14: note = source = /note="Description of Artificial Sequence: Synthetic peptide"
TGTSSDVGGYNYVS

SEQ ID NO: 819 - protein, 7 aa, synthetic construct
  REGION 1..7: note = source = /note="Description of Artificial Sequence: Synthetic peptide"
DVSNRPS

SEQ ID NO: 820 - protein, 11 aa, synthetic construct
  REGION 1..11: note = source = /note="Description of Artificial Sequence: Synthetic peptide"
SSYTSSSTLYV

SEQ ID NO: 821 - protein, 18 aa, synthetic construct
  REGION 1..18: note = source = /note="Description of Artificial Sequence: Synthetic peptide"
GSTSGSGKPGSGEGSTKG

SEQ ID NO: 822 - protein, 7 aa, synthetic construct
  REGION 1..7: note = source = /note="Description of Artificial Sequence: Synthetic peptide"
LAEAAAK

SEQ ID NO: 823 - DNA, 521 bp, unidentified
  misc_feature 1..521: note = source = /note="Description of Unknown: Wildtype PGK promoter"
  source 1..521: mol_type = other DNA
acccctctctccagccactaagccagttgctccctcggctgacggctgcacgcgaggcctccgaacgtcttacgccttgtggcgcgcccgtccttgtcccgggtgtgatggcggggtgtggggcggagggcgtggcggggaagggccggcgacgagagccgcgcgggacgactcgtcggcgataaccggtgtcgggtagcgccagccgcgcgacggtaacgagggaccgcgacaggcagacgctcccatgatcactctgcacgccgaaggcaaatagtgcaggccgtgcggcgcttggcgttccttggaagggctgaatccccgcctcgtccttcgcagcggccccccgggtgttcccatcgccgcttctaggcccactgcgacgcttgcctgcacttcttacacgctctgggtcccagccgcggcgacgcaaagggccttggtgcgggtctcgtcggcgcagggacgcgtttgggtcccgacggaaccttttccgcgttggggttggggcaccataagct

SEQ ID NO: 824 - DNA, 118 bp, synthetic construct
  misc_feature 1..118: note = source = /note="Description of Artificial Sequence: Synthetic polynucleotide"
  source 1..118: mol_type = other DNA
acccctctctccagccactaagccagttgctccctcggctgacggctgcacgcgaggcctccgaacgtcttacgccttgtggcgcgcccgtccttgtcccgggtgtgatggcggggtg

SEQ ID NO: 825 - DNA, 221 bp, synthetic construct
  misc_feature 1..221: note = source = /note="Description of Artificial Sequence: Synthetic polynucleotide"
  source 1..221: mol_type = other DNA
acccctctctccagccactaagccagttgctccctcggctgacggctgcacgcgaggcctccgaacgtcttacgccttgtggcgcgcccgtccttgtcccgggtgtgatggcggggtgtggggcggagggcgtggcggggaagggccggcgacgagagccgcgcgggacgactcgtcggcgataaccggtgtcgggtagcgccagccgcgcgacggtaacg

SEQ ID NO: 826 - DNA, 324 bp, synthetic construct
  misc_feature 1..324: note = source = /note="Description of Artificial Sequence: Synthetic polynucleotide"
  source 1..324: mol_type = other DNA
acccctctctccagccactaagccagttgctccctcggctgacggctgcacgcgaggcctccgaacgtcttacgccttgtggcgcgcccgtccttgtcccgggtgtgatggcggggtgtggggcggagggcgtggcggggaagggccggcgacgagagccgcgcgggacgactcgtcggcgataaccggtgtcgggtagcgccagccgcgcgacggtaacgagggaccgcgacaggcagacgctcccatgatcactctgcacgccgaaggcaaatagtgcaggccgtgcggcgcttggcgttccttggaagggctgaatccccg

SEQ ID NO: 827 - DNA, 422 bp, synthetic construct
  misc_feature 1..422: note = source = /note="Description of Artificial Sequence: Synthetic polynucleotide"
  source 1..422: mol_type = other DNA
acccctctctccagccactaagccagttgctccctcggctgacggctgcacgcgaggcctccgaacgtcttacgccttgtggcgcgcccgtccttgtcccgggtgtgatggcggggtgtggggcggagggcgtggcggggaagggccggcgacgagagccgcgcgggacgactcgtcggcgataaccggtgtcgggtagcgccagccgcgcgacggtaacgagggaccgcgacaggcagacgctcccatgatcactctgcacgccgaaggcaaatagtgcaggccgtgcggcgcttggcgttccttggaagggctgaatccccgcctcgtccttcgcagcggccccccgggtgttcccatcgccgcttctaggcccactgcgacgcttgcctgcacttcttacacgctctgggtcccagccg

SEQ ID NO: 828 - protein, 21 aa, synthetic construct
  VARIANT 1..3: note = /replace=" "
  SITE 1..21: note = /note="Variant residues given in the sequence have no preference with respect to those in the annotations for variant positions"
  REGION 1..21: note = source = /note="Description of Artificial Sequence: Synthetic peptide"
GSGEGRGSLLTCGDVEENPGP

SEQ ID NO: 829 - protein, 22 aa, synthetic construct
  VARIANT 1..3: note = /replace=" "
  SITE 1..22: note = /note="Variant residues given in the sequence have no preference with respect to those in the annotations for variant positions"
  REGION 1..22: note = source = /note="Description of Artificial Sequence: Synthetic peptide"
GSGATNFSLLKQAGDVEENPGP

SEQ ID NO: 830 - protein, 23 aa, synthetic construct
  VARIANT 1..3: note = /replace=" "
  SITE 1..23: note = /note="Variant residues given in the sequence have no preference with respect to those in the annotations for variant positions"
  REGION 1..23: note = source = /note="Description of Artificial Sequence: Synthetic peptide"
GSGQCTNYALLKLAGDVESNPGP

SEQ ID NO: 831 - protein, 25 aa, synthetic construct
  VARIANT 1..3: note = /replace=" "
  SITE 1..25: note = /note="Variant residues given in the sequence have no preference with respect to those in the annotations for variant positions"
  REGION 1..25: note = source = /note="Description of Artificial Sequence: Synthetic peptide"
GSGVKQTLNFDLLKLAGDVESNPGP

SEQ ID NO: 832 - DNA, 100 bp, synthetic construct
  misc_feature 1..100: note = source = /note="Description of Artificial Sequence: Synthetic polynucleotide"
  source 1..100: mol_type = other DNA
tttttttttttttttttttttttttttttttttttttttttttttttttttttttttttttttttttttttttttttttttttttttttttttttttttt

SEQ ID NO: 833 - DNA, 5000 bp, synthetic construct
  misc_feature 1..5000: note = /note="This sequence may encompass 50-5000 nucleotides"
  misc_feature 1..5000: note = source = /note="Description of Artificial Sequence: Synthetic polynucleotide"
  misc_feature 1..5000: note = source = /note="See specification as filed for detailed description of substitutions and preferred embodiments"
  source 1..5000: mol_type = other DNA
tttttttttttttttttttttttttttttttttttttttttttttttttttttttttttttttttttttttttttttttttttttttttttttttttttttttttttttttttttttttttttttttttttttttttttttttttttttttttttttttttttttttttttttttttttttttttttttttttttttttttttttttttttttttttttttttttttttttttttttttttttttttttttttttttttttttttttttttttttttttttttttttttttttttttttttttttttttttttttttttttttttttttttttttttttttttttttttttttttttttttttttttttttttttttttttttttttttttttttttttttttttttttttttttttttttttttttttttttttttttttttttttttttttttttttttttttttttttttttttttttttttttttttttttttttttttttttttttttttttttttttttttttttttttttttttttttttttttttttttttttttttttttttttttttttttttttttttttttttttttttttttttttttttttttttttttttttttttttttttttttttttttttttttttttttttttttttttttttttttttttttttttttttttttttttttttttttttttttttttttttttttttttttttttttttttttttttttttttttttttttttttttttttttttttttttttttttttttttttttttttttttttttttttttttttttttttttttttttttttttttttttttttttttttttttttttttttttttttttttttttttttttttttttttttttttttttttttttttttttttttttttttttttttttttttttttttttttttttttttttttttttttttttttttttttttttttttttttttttttttttttttttttttttttttttttttttttttttttttttttttttttttttttttttttttttttttttttttttttttttttttttttttttttttttttttttttttttttttttttttttttttttttttttttttttttttttttttttttttttttttttttttttttttttttttttttttttttttttttttttttttttttttttttttttttttttttttttttttttttttttttttttttttttttttttttttttttttttttttttttttttttttttttttttttttttttttttttttttttttttttttttttttttttttttttttttttttttttttttttttttttttttttttttttttttttttttttttttttttttttttttttttttttttttttttttttttttttttttttttttttttttttttttttttttttttttttttttttttttttttttttttttttttttttttttttttttttttttttttttttttttttttttttttttttttttttttttttttttttttttttttttttttttttttttttttttttttttttttttttttttttttttttttttttttttttttttttttttttttttttttttttttttttttttttttttttttttttttttttttttttttttttttttttttttttttttttttttttttttttttttttttttttttttttttttttttttttttttttttttttttttttttttttttttttttttttttttttttttttttttttttttttttttttttttttttttttttttttttttttttttttttttttttttttttttttttttttttttttttttttttttttttttttttttttttttttttttttttttttttttttttttttttttttttttttttttttttttttttttttttttttttttttttttttttttttttttttttttttttttttttttttttttttttttttttttttttttttttttttttttttttttttttttttttttttttttttttttttttttttttttttttttttttttttttttttttttttttttttttttttttttttttttttttttttttttttttttttttttttttttttttttttttttttttttttttttttttttttttttttttttttttttttttttttttttttttttttttttttttttttttttttttttttttttttttttttttttttttttttttttttttttttttttttttttttttttttttttttttttttttttttttttttttttttttttttttttttttttttttttttttttttttttttttttttttttttttttttttttttttttttttttttttttttttttttttttttttttttttttttttttttttttttttttttttttttttttttttttttttttttttttttttttttttttttttttttttttttttttttttttttttttttttttttttttttttttttttttttttttttttttttttttttttttttttttttttttttttttttttttttttttttttttttttttttttttttttttttttttttttttttttttttttttttttttttttttttttttttttttttttttttttttttttttttttttttttttttttttttttttttttttttttttttttttttttttttttttttttttttttttttttttttttttttttttttttttttttttttttttttttttttttttttttttttttttttttttttttttttttttttttttttttttttttttttttttttttttttttttttttttttttttttttttttttttttttttttttttttttttttttttttttttttttttttttttttttttttttttttttttttttttttttttttttttttttttttttttttttttttttttttttttttttttttttttttttttttttttttttttttttttttttttttttttttttttttttttttttttttttttttttttttttttttttttttttttttttttttttttttttttttttttttttttttttttttttttttttttttttttttttttttttttttttttttttttttttttttttttttttttttttttttttttttttttttttttttttttttttttttttttttttttttttttttttttttttttttttttttttttttttttttttttttttttttttttttttttttttttttttttttttttttttttttttttttttttttttttttttttttttttttttttttttttttttttttttttttttttttttttttttttttttttttttttttttttttttttttttttttttttttttttttttttttttttttttttttttttttttttttttttttttttttttttttttttttttttttttttttttttttttttttttttttttttttttttttttttttttttttttttttttttttttttttttttttttttttttttttttttttttttttttttttttttttttttttttttttttttttttttttttttttttttttttttttttttttttttttttttttttttttttttttttttttttttttttttttttttttttttttttttttttttttttttttttttttttttttttttttttttttttttttttttttttttttttttttttttttttttttttttttttttttttttttttttttttttttttttttttttttttttttttttttttttttttttttttttttttttttttttttttttttttttttttttttttttttttttttttttttttttttttttttttttttttttttttttttttttttttttttttttttttttttttttttttttttttttttttttttttttttttttttttttttttttttttttttttttttttttttttttttttttttttttttttttttttttttttttttttttttttttttttttttttttttttttttttttttttttttttttttttttttttttttttttttttttttttttttttttttttttttttttttttttttttttttttttttttttttttttttttttttttttttttttttttttttttttttttttttttttttttttttttttttttttttttttttttttttttttttttttttttttttttttttttttttttttttttttttttttttttttttttttttttttttttttttttttttttttttttttttttttttttttttttttttttttttttttttttttttttttttttttttttttttttttttttttttttttttttttttttttttttttttttttttttttttttttttttttttttttttttttttttttttttttttttttttttttttttttttttttttttttttttttttttttttttttttttttttttttttttttttttttttttttttttttttttttttttttttttttttttttttttttttttttttttttttttttttttttttttttttttttttttttttttttttttttttttttttttttttttttttttttttttttttttttttttttttttttttttttttttttttttttttttttttttttttttttttttttttttttttttttttttttttttttttttttttttttttttttttttttttttttttttttttttttttttttttttttttttttttttttttttttttttttttttttttttttttttttttttttttttttttttttttttttttttttttttttttttttttttttttttttttttttttttttttttttttttttttttttttttttttttttttttttttttttttttttttttttttttttttt

SEQ ID NO: 834 - DNA, 5000 bp, synthetic construct; identical to SEQ ID NO: 174
  misc_feature 1..5000: note = /note="This sequence may encompass 100-5000 nucleotides"
  misc_feature 1..5000: note = source = /note="Description of Artificial Sequence: Synthetic polynucleotide"
  misc_feature 1..5000: note = source = /note="See specification as filed for detailed description of substitutions and preferred embodiments"
  source 1..5000: mol_type = other DNA

SEQ ID NO: 835 - DNA, 400 bp, synthetic construct
  misc_feature 1..400: note = /note="This sequence may encompass 100-400 nucleotides"
  misc_feature 1..400: note = source = /note="Description of Artificial Sequence: Synthetic polynucleotide"
  misc_feature 1..400: note = source = /note="See specification as filed for detailed description of substitutions and preferred embodiments"
  source 1..400: mol_type = other DNA
aaaaaaaaaaaaaaaaaaaaaaaaaaaaaaaaaaaaaaaaaaaaaaaaaaaaaaaaaaaaaaaaaaaaaaaaaaaaaaaaaaaaaaaaaaaaaaaaaaaaaaaaaaaaaaaaaaaaaaaaaaaaaaaaaaaaaaaaaaaaaaaaaaaaaaaaaaaaaaaaaaaaaaaaaaaaaaaaaaaaaaaaaaaaaaaaaaaaaaaaaaaaaaaaaaaaaaaaaaaaaaaaaaaaaaaaaaaaaaaaaaaaaaaaaaaaaaaaaaaaaaaaaaaaaaaaaaaaaaaaaaaaaaaaaaaaaaaaaaaaaaaaaaaaaaaaaaaaaaaaaaaaaaaaaaaaaaaaaaaaaaaaaaaaaaaaaaaaaaaaaaaaaaaaaaaaaaaaaaaaaaaaaaaaaaaaaaaaaaaa

SEQ ID NO: 836 - protein, 4 aa, synthetic construct
  REGION 1..4: note = source = /note="Description of Artificial Sequence: Synthetic peptide"
RGDS

SEQ ID NO: 837 - protein, 5 aa, synthetic construct
  REGION 1..5: note = source = /note="Description of Artificial Sequence: Synthetic peptide"
MALEK

SEQ ID NO: 838 - protein, 5 aa, synthetic construct
  REGION 1..5: note = source = /note="Description of Artificial Sequence: Synthetic peptide"
NYNLH

SEQ ID NO: 839 - protein, 17 aa, synthetic construct
  REGION 1..17: note = source = /note="Description of Artificial Sequence: Synthetic peptide"
AIYPGNYDTSYNQKFKG

SEQ ID NO: 840 - protein, 13 aa, synthetic construct
  REGION 1..13: note = source = /note="Description of Artificial Sequence: Synthetic peptide"
VDFGHSRYWYFDV

SEQ ID NO: 841 - protein, 7 aa, synthetic construct
  REGION 1..7: note = source = /note="Description of Artificial Sequence: Synthetic peptide"
GYTFTNY

SEQ ID NO: 842 - protein, 6 aa, synthetic construct
  REGION 1..6: note = source = /note="Description of Artificial Sequence: Synthetic peptide"
YPGNYD

SEQ ID NO: 843 - protein, 13 aa, synthetic construct
  REGION 1..13: note = source = /note="Description of Artificial Sequence: Synthetic peptide"
VDFGHSRYWYFDV

SEQ ID NO: 844 - protein, 8 aa, synthetic construct
  REGION 1..8: note = source = /note="Description of Artificial Sequence: Synthetic peptide"
GYTFTNYN

SEQ ID NO: 845 - protein, 8 aa, synthetic construct
  REGION 1..8: note = source = /note="Description of Artificial Sequence: Synthetic peptide"
IYPGNYDT

SEQ ID NO: 846 - protein, 15 aa, synthetic construct
  REGION 1..15: note = source = /note="Description of Artificial Sequence: Synthetic peptide"
ARVDFGHSRYWYFDV

SEQ ID NO: 847 - protein, 10 aa, synthetic construct
  REGION 1..10: note = source = /note="Description of Artificial Sequence: Synthetic peptide"
GYTFTNYNLH

SEQ ID NO: 848 - protein, 17 aa, synthetic construct
  REGION 1..17: note = source = /note="Description of Artificial Sequence: Synthetic peptide"
AIYPGNYDTSYNQKFKG

SEQ ID NO: 849 - protein, 13 aa, synthetic construct
  REGION 1..13: note = source = /note="Description of Artificial Sequence: Synthetic peptide"
VDFGHSRYWYFDV

SEQ ID NO: 850 - protein, 122 aa, synthetic construct
  REGION 1..122: note = source = /note="Description of Artificial Sequence: Synthetic polypeptide"
QVQLVQSGAEVKKPGASVKVSCKASGYTFTNYNLHWVRQAPGQGLEWMGAIYPGNYDTSYNQKFKGRVTMTADKSTSTAYMELSSLRSEDTAVYYCARVDFGHSRYWYFDVWGQGTTVTVSS

SEQ ID NO: 851 - DNA, 366 bp, synthetic construct
  misc_feature 1..366: note = source = /note="Description of Artificial Sequence: Synthetic polynucleotide"
  source 1..366: mol_type = other DNA
caagtccaactcgtccagtccggtgcagaagtcaagaaacctggagcatccgtgaaagtgtcttgcaaagcctccggctacaccttcaccaactacaacctccattgggtcagacaggcccccggacaaggactcgaatggatgggagcgatctacccgggaaactacgacaccagctacaaccagaagttcaagggccgcgtgactatgaccgccgataagagcacctccaccgcctacatggaactgtcctcgctgaggtccgaggacactgcggtgtactactgcgcccgcgtggacttcggacactcacggtattggtacttcgacgtctggggacagggcactaccgtgaccgtgtcgagc

SEQ ID NO: 852 - protein, 10 aa, synthetic construct
  REGION 1..10: note = source = /note="Description of Artificial Sequence: Synthetic peptide"
RATSSVSSMN

SEQ ID NO: 853 - protein, 7 aa, synthetic construct
  REGION 1..7: note = source = /note="Description of Artificial Sequence: Synthetic peptide"
ATSNLAS

SEQ ID NO: 854 - protein, 9 aa, synthetic construct
  REGION 1..9: note = source = /note="Description of Artificial Sequence: Synthetic peptide"
QQWTFNPPT

SEQ ID NO: 855 - protein, 6 aa, synthetic construct
  REGION 1..6: note = source = /note="Description of Artificial Sequence: Synthetic peptide"
TSSVSS

SEQ ID NO: 856 - skipped

SEQ ID NO: 857 - protein, 6 aa, synthetic construct
  REGION 1..6: note = source = /note="Description of Artificial Sequence: Synthetic peptide"
WTFNPP

SEQ ID NO: 858 - protein, 5 aa, synthetic construct
  REGION 1..5: note = source = /note="Description of Artificial Sequence: Synthetic peptide"
SSVSS

SEQ ID NO: 859 - skipped

SEQ ID NO: 860 - protein, 9 aa, synthetic construct
  REGION 1..9: note = source = /note="Description of Artificial Sequence: Synthetic peptide"
QQWTFNPPT

SEQ ID NO: 861 - protein, 10 aa, synthetic construct
  REGION 1..10: note = source = /note="Description of Artificial Sequence: Synthetic peptide"
RATSSVSSMN

SEQ ID NO: 862 - protein, 7 aa, synthetic construct
  REGION 1..7: note = source = /note="Description of Artificial Sequence: Synthetic peptide"
ATSNLAS

SEQ ID NO: 863 - protein, 9 aa, synthetic construct
  REGION 1..9: note = source = /note="Description of Artificial Sequence: Synthetic peptide"
QQWTFNPPT

SEQ ID NO: 864 - protein, 106 aa, synthetic construct
  REGION 1..106: note = source = /note="Description of Artificial Sequence: Synthetic polypeptide"
DIQLTQSPSFLSASVGDRVTITCRATSSVSSMNWYQQKPGKAPKPLIHATSNLASGVPSRFSGSGSGTEYTLTISSLQPEDFATYYCQQWTFNPPTFGQGTKLEIK

SEQ ID NO: 865 - DNA, 318 bp, synthetic construct
  misc_feature 1..318: note = source = /note="Description of Artificial Sequence: Synthetic polynucleotide"
  source 1..318: mol_type = other DNA
gatatccagctgactcagtccccgtcattcctgtccgcctccgtgggagacagagtgaccatcacctgtcgggccacttcctccgtgtcaagcatgaactggtatcagcagaagcccgggaaggccccaaagccgctgattcacgcgacgtccaacctggcttccggcgtgccgagccggttctccggctcggggagcgggactgagtacaccctgactatttcctcgcttcaacccgaggactttgctacctactactgccaacagtggaccttcaatcctccgacattcggacagggtaccaagttggaaatcaag

SEQ ID NO: 866 - protein, 20 aa, synthetic construct
  REGION 1..20: note = source = /note="Description of Artificial Sequence: Synthetic peptide"
GGGGSGGGGSGGGGSGGGGS

SEQ ID NO: 867 - protein, 248 aa, synthetic construct
  REGION 1..248: note = source = /note="Description of Artificial Sequence: Synthetic polypeptide"
QVQLVQSGAEVKKPGASVKVSCKASGYTFTNYNLHWVRQAPGQGLEWMGAIYPGNYDTSYNQKFKGRVTMTADKSTSTAYMELSSLRSEDTAVYYCARVDFGHSRYWYFDVWGQGTTVTVSSGGGGSGGGGSGGGGSGGGGSDIQLTQSPSFLSASVGDRVTITCRATSSVSSMNWYQQKPGKAPKPLIHATSNLASGVPSRFSGSGSGTEYTLTISSLQPEDFATYYCQQWTFNPPTFGQGTKLEIK

SEQ ID NO: 868 - DNA, 744 bp, synthetic construct
  misc_feature 1..744: note = source = /note="Description of Artificial Sequence: Synthetic polynucleotide"
  source 1..744: mol_type = other DNA
caagtccaactcgtccagtccggtgcagaagtcaagaaacctggagcatccgtgaaagtgtcttgcaaagcctccggctacaccttcaccaactacaacctccattgggtcagacaggcccccggacaaggactcgaatggatgggagcgatctacccgggaaactacgacaccagctacaaccagaagttcaagggccgcgtgactatgaccgccgataagagcacctccaccgcctacatggaactgtcctcgctgaggtccgaggacactgcggtgtactactgcgcccgcgtggacttcggacactcacggtattggtacttcgacgtctggggacagggcactaccgtgaccgtgtcgagcggcggaggaggttcgggagggggcggatcagggggcggcggcagcggtggagggggctcggatatccagctgactcagtccccgtcattcctgtccgcctccgtgggagacagagtgaccatcacctgtcgggccacttcctccgtgtcaagcatgaactggtatcagcagaagcccgggaaggccccaaagccgctgattcacgcgacgtccaacctggcttccggcgtgccgagccggttctccggctcggggagcgggactgagtacaccctgactatttcctcgcttcaacccgaggactttgctacctactactgccaacagtggaccttcaatcctccgacattcggacagggtaccaagttggaaatcaag

SEQ ID NO: 869 - protein, 492 aa, synthetic construct
  REGION 1..492: note = source = /note="Description of Artificial Sequence: Synthetic polypeptide"
MALPVTALLLPLALLLHAARPQVQLVQSGAEVKKPGASVKVSCKASGYTFTNYNLHWVRQAPGQGLEWMGAIYPGNYDTSYNQKFKGRVTMTADKSTSTAYMELSSLRSEDTAVYYCARVDFGHSRYWYFDVWGQGTTVTVSSGGGGSGGGGSGGGGSGGGGSDIQLTQSPSFLSASVGDRVTITCRATSSVSSMNWYQQKPGKAPKPLIHATSNLASGVPSRFSGSGSGTEYTLTISSLQPEDFATYYCQQWTFNPPTFGQGTKLEIKTTTPAPRPPTPAPTIASQPLSLRPEACRPAAGGAVHTRGLDFACDIYIWAPLAGTCGVLLLSLVITLYCKRGRKKLLYIFKQPFMRPVQTTQEEDGCSCRFPEEEEGGCELRVKFSRSADAPAYQQGQNQLYNELNLGRREEYDVLDKRRGRDPEMGGKPRRKNPQEGLYNELQKDKMAEAYSEIGMKGERRRGKGHDGLYQGLSTATKDTYDALHMQALPPR

SEQ ID NO: 870 - DNA, 1476 bp, synthetic construct
  misc_feature 1..1476: note = source = /note="Description of Artificial Sequence: Synthetic polynucleotide"
  source 1..1476: mol_type = other DNA
atggccctccctgtcaccgccctgctgcttccgctggctcttctgctccacgccgctcggccccaagtccaactcgtccagtccggtgcagaagtcaagaaacctggagcatccgtgaaagtgtcttgcaaagcctccggctacaccttcaccaactacaacctccattgggtcagacaggcccccggacaaggactcgaatggatgggagcgatctacccgggaaactacgacaccagctacaaccagaagttcaagggccgcgtgactatgaccgccgataagagcacctccaccgcctacatggaactgtcctcgctgaggtccgaggacactgcggtgtactactgcgcccgcgtggacttcggacactcacggtattggtacttcgacgtctggggacagggcactaccgtgaccgtgtcgagcggcggaggaggttcgggagggggcggatcagggggcggcggcagcggtggagggggctcggatatccagctgactcagtccccgtcattcctgtccgcctccgtgggagacagagtgaccatcacctgtcgggccacttcctccgtgtcaagcatgaactggtatcagcagaagcccgggaaggccccaaagccgctgattcacgcgacgtccaacctggcttccggcgtgccgagccggttctccggctcggggagcgggactgagtacaccctgactatttcctcgcttcaacccgaggactttgctacctactactgccaacagtggaccttcaatcctccgacattcggacagggtaccaagttggaaatcaagaccactaccccagcaccgaggccacccaccccggctcctaccatcgcctcccagcctctgtccctgcgtccggaggcatgtagacccgcagctggtggggccgtgcatacccggggtcttgacttcgcctgcgatatctacatttgggcccctctggctggtacttgcggggtcctgctgctttcactcgtgatcactctttactgtaagcgcggtcggaagaagctgctgtacatctttaagcaacccttcatgaggcctgtgcagactactcaagaggaggacggctgttcatgccggttcccagaggaggaggaaggcggctgcgaactgcgcgtgaaattcagccgcagcgcagatgctccagcctaccagcaggggcagaaccagctctacaacgaactcaatcttggtcggagagaggagtacgacgtgctggacaagcggagaggacgggacccagaaatgggcgggaagccgcgcagaaagaatccccaagagggcctgtacaacgagctccaaaaggataagatggcagaagcctatagcgagattggtatgaaaggggaacgcagaagaggcaaaggccacgacggactgtaccagggactcagcaccgccaccaaggacacctatgacgctcttcacatgcaggccctgccgcctcgg

SEQ ID NO: 871 - protein, 5 aa, synthetic construct
  REGION 1..5: note = source = /note="Description of Artificial Sequence: Synthetic peptide"
SYNMH

SEQ ID NO: 872 - protein, 17 aa, synthetic construct
  REGION 1..17: note = source = /note="Description of Artificial Sequence: Synthetic peptide"
AIYPGNGDTSYNPKFKG

SEQ ID NO: 873 - protein, 13 aa, synthetic construct
  REGION 1..13: note = source = /note="Description of Artificial Sequence: Synthetic peptide"
SYFYGSSSWYFDV

SEQ ID NO: 874 - protein, 7 aa, synthetic construct
  REGION 1..7: note = source = /note="Description of Artificial Sequence: Synthetic peptide"
GYTFTSY

SEQ ID NO: 875 - protein, 6 aa, synthetic construct
  REGION 1..6: note = source = /note="Description of Artificial Sequence: Synthetic peptide"
YPGNGD

SEQ ID NO: 876 - protein, 13 aa, synthetic construct
  REGION 1..13: note = source = /note="Description of Artificial Sequence: Synthetic peptide"
SYFYGSSSWYFDV

SEQ ID NO: 877 - protein, 8 aa, synthetic construct
  REGION 1..8: note = source = /note="Description of Artificial Sequence: Synthetic peptide"
GYTFTSYN

SEQ ID NO: 878 - protein, 8 aa, synthetic construct
  REGION 1..8: note = source = /note="Description of Artificial Sequence: Synthetic peptide"
IYPGNGDT

SEQ ID NO: 879 - protein, 15 aa, synthetic construct
  REGION 1..15: note = source = /note="Description of Artificial Sequence: Synthetic peptide"
ARSYFYGSSSWYFDV

SEQ ID NO: 880 - protein, 10 aa, synthetic construct
  REGION 1..10: note = source = /note="Description of Artificial Sequence: Synthetic peptide"
GYTFTSYNMH

SEQ ID NO: 881 - protein, 17 aa, synthetic construct
  REGION 1..17: note = source = /note="Description of Artificial Sequence: Synthetic peptide"
AIYPGNGDTSYNPKFKG

SEQ ID NO: 882 - protein, 13 aa, synthetic construct
  REGION 1..13: note = source = /note="Description of Artificial Sequence: Synthetic peptide"
SYFYGSSSWYFDV

SEQ ID NO: 883 - protein, 122 aa, synthetic construct
  REGION 1..122: note = source = /note="Description of Artificial Sequence: Synthetic polypeptide"
QVQLVQSGAEVKKPGASVKVSCKASGYTFTSYNMHWVRQAPGQGLEWMGAIYPGNGDTSYNPKFKGRVTMTADKSTRTAYMELSSLRSEDTAVYYCARSYFYGSSSWYFDVWGQGTTVTVSS

SEQ ID NO: 884 - DNA, 366 bp, synthetic construct
  misc_feature 1..366: note = source = /note="Description of Artificial Sequence: Synthetic polynucleotide"
  source 1..366: mol_type = other DNA
caagtgcagctcgtccagtccggtgcagaagtcaagaaacccggtgcttcagtgaaagtgtcctgcaaggcctccggttacaccttcacctcctacaacatgcactgggtccgccaagccccgggccagggactcgaatggatgggagccatctaccctggcaacggggacacctcatacaaccctaagttcaagggcagagtgaccatgactgcggacaagtccactagaacagcgtacatggagctgagcagcctgcggtccgaggatactgccgtgtactactgcgcccgctcctacttctacggaagctcgtcgtggtacttcgatgtctggggacagggcaccactgtgactgtgtcctcc

SEQ ID NO: 885 - protein, 10 aa, synthetic construct
  REGION 1..10: note = source = /note="Description of Artificial Sequence: Synthetic peptide"
RASSSVSSMH

SEQ ID NO: 886 - protein, 7 aa, synthetic construct
  REGION 1..7: note = source = /note="Description of Artificial Sequence: Synthetic peptide"
ATSNLAS

SEQ ID NO: 887 - protein, 9 aa, synthetic construct
  REGION 1..9: note = source = /note="Description of Artificial Sequence: Synthetic peptide"
QQWIFNPPT

SEQ ID NO: 888 - protein, 6 aa, synthetic construct
  REGION 1..6: note = source = /note="Description of Artificial Sequence: Synthetic peptide"
SSSVSS

SEQ ID NO: 889 - skipped

SEQ ID NO: 890 - protein, 6 aa, synthetic construct
  REGION 1..6: note = source = /note="Description of Artificial Sequence: Synthetic peptide"
WIFNPP

SEQ ID NO: 891 - protein, 5 aa, synthetic construct
  REGION 1..5: note = source = /note="Description of Artificial Sequence: Synthetic peptide"
SSVSS

SEQ ID NO: 892 - skipped

SEQ ID NO: 893 - protein, 9 aa, synthetic construct
  REGION 1..9: note = source = /note="Description of Artificial Sequence: Synthetic peptide"
QQWIFNPPT

SEQ ID NO: 894 - protein, 10 aa, synthetic construct
  REGION 1..10: note = source = /note="Description of Artificial Sequence: Synthetic peptide"
RASSSVSSMH

SEQ ID NO: 895 - protein, 7 aa, synthetic construct
  REGION 1..7: note = source = /note="Description of Artificial Sequence: Synthetic peptide"
ATSNLAS

SEQ ID NO: 896 - protein, 9 aa, synthetic construct
  REGION 1..9: note = source = /note="Description of Artificial Sequence: Synthetic peptide"
QQWIFNPPT

SEQ ID NO: 897 - protein, 106 aa, synthetic construct
  REGION 1..106: note = source = /note="Description of Artificial Sequence: Synthetic polypeptide"
EIVLTQSPATLSLSPGERATLSCRASSSVSSMHWYQQKPGQAPRPLIFATSNLASGIPARFSGSGSGTDYTLTISSLEPEDAAVYYCQQWIFNPPTFGGGTKVEIK

SEQ ID NO: 898 - DNA, 318 bp, synthetic construct
  misc_feature 1..318: note = source = /note="Description of Artificial Sequence: Synthetic polynucleotide"
  source 1..318: mol_type = other DNA
gaaattgtgctgactcagagccccgccaccctgagcttgtcccccggggaaagggcaacgctgtcatgccgcgcctcgtcatccgtgtcctccatgcattggtaccagcagaagccgggacaggcccctcggccgctgatcttcgccacctccaatctcgcttccggcattccggcccggttctcgggaagcgggtcggggaccgactataccctgaccatctctagccttgaacctgaggacgccgcggtgtactattgtcaacagtggatctttaaccccccaaccttcggtggaggcaccaaagtggagattaag

SEQ ID NO: 899 - protein, 20 aa, synthetic construct
  REGION 1..20: note = source = /note="Description of Artificial Sequence: Synthetic peptide"
GGGGSGGGGSGGGGSGGGGS

SEQ ID NO: 900 - protein, 248 aa, synthetic construct
  REGION 1..248: note = source = /note="Description of Artificial Sequence: Synthetic polypeptide"
QVQLVQSGAEVKKPGASVKVSCKASGYTFTSYNMHWVRQAPGQGLEWMGAIYPGNGDTSYNPKFKGRVTMTADKSTRTAYMELSSLRSEDTAVYYCARSYFYGSSSWYFDVWGQGTTVTVSSGGGGSGGGGSGGGGSGGGGSEIVLTQSPATLSLSPGERATLSCRASSSVSSMHWYQQKPGQAPRPLIFATSNLASGIPARFSGSGSGTDYTLTISSLEPEDAAVYYCQQWIFNPPTFGGGTKVEIK

SEQ ID NO: 901 - DNA, 744 bp, synthetic construct
  misc_feature 1..744: note = source = /note="Description of Artificial Sequence: Synthetic polynucleotide"
  source 1..744: mol_type = other DNA
caagtgcagctcgtccagtccggtgcagaagtcaagaaacccggtgcttcagtgaaagtgtcctgcaaggcctccggttacaccttcacctcctacaacatgcactgggtccgccaagccccgggccagggactcgaatggatgggagccatctaccctggcaacggggacacctcatacaaccctaagttcaagggcagagtgaccatgactgcggacaagtccactagaacagcgtacatggagctgagcagcctgcggtccgaggatactgccgtgtactactgcgcccgctcctacttctacggaagctcgtcgtggtacttcgatgtctggggacagggcaccactgtgactgtgtcctccggtggcggaggctcgggcggaggcggaagcggcggcgggggatcgggaggaggagggtccgaaattgtgctgactcagagccccgccaccctgagcttgtcccccggggaaagggcaacgctgtcatgccgcgcctcgtcatccgtgtcctccatgcattggtaccagcagaagccgggacaggcccctcggccgctgatcttcgccacctccaatctcgcttccggcattccggcccggttctcgggaagcgggtcggggaccgactataccctgaccatctctagccttgaacctgaggacgccgcggtgtactattgtcaacagtggatctttaaccccccaaccttcggtggaggcaccaaagtggagattaag

SEQ ID NO: 902 - protein, 492 aa, synthetic construct
  REGION 1..492: note = source = /note="Description of Artificial Sequence: Synthetic polypeptide"
MALPVTALLLPLALLLHAARPQVQLVQSGAEVKKPGASVKVSCKASGYTFTSYNMHWVRQAPGQGLEWMGAIYPGNGDTSYNPKFKGRVTMTADKSTRTAYMELSSLRSEDTAVYYCARSYFYGSSSWYFDVWGQGTTVTVSSGGGGSGGGGSGGGGSGGGGSEIVLTQSPATLSLSPGERATLSCRASSSVSSMHWYQQKPGQAPRPLIFATSNLASGIPARFSGSGSGTDYTLTISSLEPEDAAVYYCQQWIFNPPTFGGGTKVEIKTTTPAPRPPTPAPTIASQPLSLRPEACRPAAGGAVHTRGLDFACDIYIWAPLAGTCGVLLLSLVITLYCKRGRKKLLYIFKQPFMRPVQTTQEEDGCSCRFPEEEEGGCELRVKFSRSADAPAYQQGQNQLYNELNLGRREEYDVLDKRRGRDPEMGGKPRRKNPQEGLYNELQKDKMAEAYSEIGMKGERRRGKGHDGLYQGLSTATKDTYDALHMQALPPR

SEQ ID NO: 903 - DNA, 1476 bp, synthetic construct
  misc_feature 1..1476: note = source = /note="Description of Artificial Sequence: Synthetic polynucleotide"
  source 1..1476: mol_type = other DNA
atggccctccctgtcaccgccctgctgcttccgctggctcttctgctccacgccgctcggccccaagtgcagctcgtccagtccggtgcagaagtcaagaaacccggtgcttcagtgaaagtgtcctgcaaggcctccggttacaccttcacctcctacaacatgcactgggtccgccaagccccgggccagggactcgaatggatgggagccatctaccctggcaacggggacacctcatacaaccctaagttcaagggcagagtgaccatgactgcggacaagtccactagaacagcgtacatggagctgagcagcctgcggtccgaggatactgccgtgtactactgcgcccgctcctacttctacggaagctcgtcgtggtacttcgatgtctggggacagggcaccactgtgactgtgtcctccggtggcggaggctcgggcggaggcggaagcggcggcgggggatcgggaggaggagggtccgaaattgtgctgactcagagccccgccaccctgagcttgtcccccggggaaagggcaacgctgtcatgccgcgcctcgtcatccgtgtcctccatgcattggtaccagcagaagccgggacaggcccctcggccgctgatcttcgccacctccaatctcgcttccggcattccggcccggttctcgggaagcgggtcggggaccgactataccctgaccatctctagccttgaacctgaggacgccgcggtgtactattgtcaacagtggatctttaaccccccaaccttcggtggaggcaccaaagtggagattaagaccactaccccagcaccgaggccacccaccccggctcctaccatcgcctcccagcctctgtccctgcgtccggaggcatgtagacccgcagctggtggggccgtgcatacccggggtcttgacttcgcctgcgatatctacatttgggcccctctggctggtacttgcggggtcctgctgctttcactcgtgatcactctttactgtaagcgcggtcggaagaagctgctgtacatctttaagcaacccttcatgaggcctgtgcagactactcaagaggaggacggctgttcatgccggttcccagaggaggaggaaggcggctgcgaactgcgcgtgaaattcagccgcagcgcagatgctccagcctaccagcaggggcagaaccagctctacaacgaactcaatcttggtcggagagaggagtacgacgtgctggacaagcggagaggacgggacccagaaatgggcgggaagccgcgcagaaagaatccccaagagggcctgtacaacgagctccaaaaggataagatggcagaagcctatagcgagattggtatgaaaggggaacgcagaagaggcaaaggccacgacggactgtaccagggactcagcaccgccaccaaggacacctatgacgctcttcacatgcaggccctgccgcctcgg

SEQ ID NO: 904 - protein, 5 aa, synthetic construct
  REGION 1..5: note = source = /note="Description of Artificial Sequence: Synthetic peptide"
NYWMH

SEQ ID NO: 905 - protein, 17 aa, synthetic construct
  REGION 1..17: note = source = /note="Description of Artificial Sequence: Synthetic peptide"
FITPTTGYPEYNQKFKD

SEQ ID NO: 906 - protein, 13 aa, synthetic construct
  REGION 1..13: note = source = /note="Description of Artificial Sequence: Synthetic peptide"
RKVGKGVYYALDY

SEQ ID NO: 907 - protein, 7 aa, synthetic construct
  REGION 1..7: note = source = /note="Description of Artificial Sequence: Synthetic peptide"
GYTFTNY

SEQ ID NO: 908 - protein, 6 aa, synthetic construct
  REGION 1..6: note = source = /note="Description of Artificial Sequence: Synthetic peptide"
TPTTGY

SEQ ID NO: 909 - protein, 13 aa, synthetic construct
  REGION 1..13: note = source = /note="Description of Artificial Sequence: Synthetic peptide"
RKVGKGVYYALDY

SEQ ID NO: 910 - protein, 8 aa, synthetic construct
  REGION 1..8: note = source = /note="Description of Artificial Sequence: Synthetic peptide"
GYTFTNYW

SEQ ID NO: 911 - protein, 8 aa, synthetic construct
  REGION 1..8: note = source = /note="Description of Artificial Sequence: Synthetic peptide"
ITPTTGYP

SEQ ID NO: 912 - protein, 15 aa, synthetic construct
  REGION 1..15: note = source = /note="Description of Artificial Sequence: Synthetic peptide"
ARRKVGKGVYYALDY

SEQ ID NO: 913 - protein, 10 aa, synthetic construct
  REGION 1..10: note = source = /note="Description of Artificial Sequence: Synthetic peptide"
GYTFTNYWMH

SEQ ID NO: 914 - protein, 17 aa, synthetic construct
  REGION 1..17: note = source = /note="Description of Artificial Sequence: Synthetic peptide"
FITPTTGYPEYNQKFKD

SEQ ID NO: 915 - protein, 13 aa, synthetic construct
  REGION 1..13: note = source = /note="Description of Artificial Sequence: Synthetic peptide"
RKVGKGVYYALDY

SEQ ID NO: 916 - protein, 122 aa, synthetic construct
  REGION 1..122: note = source = /note="Description of Artificial Sequence: Synthetic polypeptide"
QVQLVQSGAEVKKPGASVKVSCKASGYTFTNYWMHWVRQAPGQGLEWMGFITPTTGYPEYNQKFKDRVTMTADKSTSTAYMELSSLRSEDTAVYYCARRKVGKGVYYALDYWGQGTTVTVSS

SEQ ID NO: 917 - DNA, 366 bp, synthetic construct
  misc_feature 1..366: note = source = /note="Description of Artificial Sequence: Synthetic polynucleotide"
  source 1..366: mol_type = other DNA
caagtgcaactcgtccagtccggtgcagaagtcaagaaaccaggcgcatccgtgaaagtctcctgcaaagcctccggctacacattcactaactattggatgcattgggtgcgccaggccccgggacaggggctggagtggatggggttcattacccctaccaccggctaccctgagtacaaccagaagttcaaggatagggtcaccatgaccgctgacaagtccacctccaccgcgtacatggaactgtcatcgctccggtccgaggataccgcggtgtactactgcgcccggagaaaagtcggaaagggagtgtattacgccttggactactggggacaggggactaccgtgaccgtgtcgagc

SEQ ID NO: 918 - protein, 11 aa, synthetic construct
  REGION 1..11: note = source = /note="Description of Artificial Sequence: Synthetic peptide"
RASGNIHNYLA

SEQ ID NO: 919 - protein, 7 aa, synthetic construct
  REGION 1..7: note = source = /note="Description of Artificial Sequence: Synthetic peptide"
NTKTLAD

SEQ ID NO: 920 - protein, 9 aa, synthetic construct
  REGION 1..9: note = source = /note="Description of Artificial Sequence: Synthetic peptide"
QHFWSSPWT

SEQ ID NO: 921 - protein, 7 aa, synthetic construct
  REGION 1..7: note = source = /note="Description of Artificial Sequence: Synthetic peptide"
SGNIHNY

SEQ ID NO: 922 - skipped

SEQ ID NO: 923 - protein, 6 aa, synthetic construct
  REGION 1..6: note = source = /note="Description of Artificial Sequence: Synthetic peptide"
FWSSPW

SEQ ID NO: 924 - protein, 6 aa, synthetic construct
  REGION 1..6: note = source = /note="Description of Artificial Sequence: Synthetic peptide"
GNIHNY

SEQ ID NO: 925 - skipped

SEQ ID NO: 926 - protein, 9 aa, synthetic construct
  REGION 1..9: note = source = /note="Description of Artificial Sequence: Synthetic peptide"
QHFWSSPWT

SEQ ID NO: 927 - protein, 11 aa, synthetic construct
  REGION 1..11: note = source = /note="Description of Artificial Sequence: Synthetic peptide"
RASGNIHNYLA

SEQ ID NO: 928 - protein, 7 aa, synthetic construct
  REGION 1..7: note = source = /note="Description of Artificial Sequence: Synthetic peptide"
NTKTLAD

SEQ ID NO: 929 - protein, 9 aa, synthetic construct
  REGION 1..9: note = source = /note="Description of Artificial Sequence: Synthetic peptide"
QHFWSSPWT

SEQ ID NO: 930 - protein, 107 aa, synthetic construct
  REGION 1..107: note = source = /note="Description of Artificial Sequence: Synthetic polypeptide"
DIQMTQSPSSLSASVGDRVTITCRASGNIHNYLAWYQQKPGKVPKLLIYNTKTLADGVPSRFSGSGSGTDYTLTISSLQPEDVATYYCQHFWSSPWTFGGGTKVEIK

SEQ ID NO: 931 - DNA, 321 bp, synthetic construct
  misc_feature 1..321: note = source = /note="Description of Artificial Sequence: Synthetic polynucleotide"
  source 1..321: mol_type = other DNA
gacatccagatgacccagtccccgtcaagccttagcgcctccgtgggcgaccgcgtgaccattacttgtcgggcgtcgggaaacatccacaactacctcgcctggtaccagcagaagccgggaaaggtccccaagctgctgatctacaataccaagactctggccgacggagtgccttcccgcttttccggttcgggaagcgggactgactacaccctgactatctcctcgctgcaacccgaagatgtggctacgtactactgccagcacttctggtcctctccctggaccttcggcggtggcactaaggtcgagattaag

SEQ ID NO: 932 - protein, 20 aa, synthetic construct
  REGION 1..20: note = source = /note="Description of Artificial Sequence: Synthetic peptide"
GGGGSGGGGSGGGGSGGGGS

SEQ ID NO: 933 - protein, 249 aa, synthetic construct
  REGION 1..249: note = source = /note="Description of Artificial Sequence: Synthetic polypeptide"
QVQLVQSGAEVKKPGASVKVSCKASGYTFTNYWMHWVRQAPGQGLEWMGFITPTTGYPEYNQKFKDRVTMTADKSTSTAYMELSSLRSEDTAVYYCARRKVGKGVYYALDYWGQGTTVTVSSGGGGSGGGGSGGGGSGGGGSDIQMTQSPSSLSASVGDRVTITCRASGNIHNYLAWYQQKPGKVPKLLIYNTKTLADGVPSRFSGSGSGTDYTLTISSLQPEDVATYYCQHFWSSPWTFGGGTKVEIK

SEQ ID NO: 934 - DNA, 747 bp, synthetic construct
  misc_feature 1..747: note = source = /note="Description of Artificial Sequence: Synthetic polynucleotide"
  source 1..747: mol_type = other DNA
caagtgcaactcgtccagtccggtgcagaagtcaagaaaccaggcgcatccgtgaaagtctcctgcaaagcctccggctacacattcactaactattggatgcattgggtgcgccaggccccgggacaggggctggagtggatggggttcattacccctaccaccggctaccctgagtacaaccagaagttcaaggatagggtcaccatgaccgctgacaagtccacctccaccgcgtacatggaactgtcatcgctccggtccgaggataccgcggtgtactactgcgcccggagaaaagtcggaaagggagtgtattacgccttggactactggggacaggggactaccgtgaccgtgtcgagcggtggaggcggctccggcggaggaggaagcgggggaggcggttcagggggcggaggaagcgacatccagatgacccagtccccgtcaagccttagcgcctccgtgggcgaccgcgtgaccattacttgtcgggcgtcgggaaacatccacaactacctcgcctggtaccagcagaagccgggaaaggtccccaagctgctgatctacaataccaagactctggccgacggagtgccttcccgcttttccggttcgggaagcgggactgactacaccctgactatctcctcgctgcaacccgaagatgtggctacgtactactgccagcacttctggtcctctccctggaccttcggcggtggcactaaggtcgagattaag

SEQ ID NO: 935 - protein, 493 aa, synthetic construct
  REGION 1..493: note = source = /note="Description of Artificial Sequence: Synthetic polypeptide"
MALPVTALLLPLALLLHAARPQVQLVQSGAEVKKPGASVKVSCKASGYTFTNYWMHWVRQAPGQGLEWMGFITPTTGYPEYNQKFKDRVTMTADKSTSTAYMELSSLRSEDTAVYYCARRKVGKGVYYALDYWGQGTTVTVSSGGGGSGGGGSGGGGSGGGGSDIQMTQSPSSLSASVGDRVTITCRASGNIHNYLAWYQQKPGKVPKLLIYNTKTLADGVPSRFSGSGSGTDYTLTISSLQPEDVATYYCQHFWSSPWTFGGGTKVEIKTTTPAPRPPTPAPTIASQPLSLRPEACRPAAGGAVHTRGLDFACDIYIWAPLAGTCGVLLLSLVITLYCKRGRKKLLYIFKQPFMRPVQTTQEEDGCSCRFPEEEEGGCELRVKFSRSADAPAYQQGQNQLYNELNLGRREEYDVLDKRRGRDPEMGGKPRRKNPQEGLYNELQKDKMAEAYSEIGMKGERRRGKGHDGLYQGLSTATKDTYDALHMQALPPR

SEQ ID NO: 936 - DNA, 1479 bp, synthetic construct
  misc_feature 1..1479: note = source = /note="Description of Artificial Sequence: Synthetic polynucleotide"
  source 1..1479: mol_type = other DNA
atggccctccctgtcaccgccctgctgcttccgctggctcttctgctccacgccgctcggccccaagtgcaactcgtccagtccggtgcagaagtcaagaaaccaggcgcatccgtgaaagtctcctgcaaagcctccggctacacattcactaactattggatgcattgggtgcgccaggccccgggacaggggctggagtggatggggttcattacccctaccaccggctaccctgagtacaaccagaagttcaaggatagggtcaccatgaccgctgacaagtccacctccaccgcgtacatggaactgtcatcgctccggtccgaggataccgcggtgtactactgcgcccggagaaaagtcggaaagggagtgtattacgccttggactactggggacaggggactaccgtgaccgtgtcgagcggtggaggcggctccggcggaggaggaagcgggggaggcggttcagggggcggaggaagcgacatccagatgacccagtccccgtcaagccttagcgcctccgtgggcgaccgcgtgaccattacttgtcgggcgtcgggaaacatccacaactacctcgcctggtaccagcagaagccgggaaaggtccccaagctgctgatctacaataccaagactctggccgacggagtgccttcccgcttttccggttcgggaagcgggactgactacaccctgactatctcctcgctgcaacccgaagatgtggctacgtactactgccagcacttctggtcctctccctggaccttcggcggtggcactaaggtcgagattaagaccactaccccagcaccgaggccacccaccccggctcctaccatcgcctcccagcctctgtccctgcgtccggaggcatgtagacccgcagctggtggggccgtgcatacccggggtcttgacttcgcctgcgatatctacatttgggcccctctggctggtacttgcggggtcctgctgctttcactcgtgatcactctttactgtaagcgcggtcggaagaagctgctgtacatctttaagcaacccttcatgaggcctgtgcagactactcaagaggaggacggctgttcatgccggttcccagaggaggaggaaggcggctgcgaactgcgcgtgaaattcagccgcagcgcagatgctccagcctaccagcaggggcagaaccagctctacaacgaactcaatcttggtcggagagaggagtacgacgtgctggacaagcggagaggacgggacccagaaatgggcgggaagccgcgcagaaagaatccccaagagggcctgtacaacgagctccaaaaggataagatggcagaagcctatagcgagattggtatgaaaggggaacgcagaagaggcaaaggccacgacggactgtaccagggactcagcaccgccaccaaggacacctatgacgctcttcacatgcaggccctgccgcctcgg

SEQ ID NO: 937 - protein, 5 aa, synthetic construct
  REGION 1..5: note = source = /note="Description of Artificial Sequence: Synthetic peptide"
NYWMH

SEQ ID NO: 938 - protein, 17 aa, synthetic construct
  REGION 1..17: note = source = /note="Description of Artificial Sequence: Synthetic peptide"
FITPTTGYPEYNQKFKD

SEQ ID NO: 939 - protein, 13 aa, synthetic construct
  REGION 1..13: note = source = /note="Description of Artificial Sequence: Synthetic peptide"
RKVGKGVYYALDY

SEQ ID NO: 940 - protein, 7 aa, synthetic construct
  REGION 1..7: note = source = /note="Description of Artificial Sequence: Synthetic peptide"
GYTFTNY

SEQ ID NO: 941 - protein, 6 aa, synthetic construct
  REGION 1..6: note = source = /note="Description of Artificial Sequence: Synthetic peptide"
TPTTGY

SEQ ID NO: 942 - protein, 13 aa, synthetic construct
  REGION 1..13: note = source = /note="Description of Artificial Sequence: Synthetic peptide"
RKVGKGVYYALDY

SEQ ID NO: 943 - protein, 8 aa, synthetic construct
  REGION 1..8: note = source = /note="Description of Artificial Sequence: Synthetic peptide"
GYTFTNYW

SEQ ID NO: 944 - protein, 8 aa, synthetic construct
  REGION 1..8: note = source = /note="Description of Artificial Sequence: Synthetic peptide"
ITPTTGYP

SEQ ID NO: 945 - protein, 15 aa, synthetic construct
  REGION 1..15: note = source = /note="Description of Artificial Sequence: Synthetic peptide"
ARRKVGKGVYYALDY

SEQ ID NO: 946 - protein, 10 aa, synthetic construct
  REGION 1..10: note = source = /note="Description of Artificial Sequence: Synthetic peptide"
GYTFTNYWMH

SEQ ID NO: 947 - protein, 17 aa, synthetic construct
  REGION 1..17: note = source = /note="Description of Artificial Sequence: Synthetic peptide"
FITPTTGYPEYNQKFKD

SEQ ID NO: 948 - protein, 13 aa, synthetic construct
  REGION 1..13: note = source = /note="Description of Artificial Sequence: Synthetic peptide"
RKVGKGVYYALDY

SEQ ID NO: 949 - protein, 122 aa, synthetic construct
  REGION 1..122: note = source = /note="Description of Artificial Sequence: Synthetic polypeptide"
QVQLVQSGAEVKKPGSSVKVSCKASGYTFTNYWMHWVRQAPGQGLEWMGFITPTTGYPEYNQKFKDRVTITADKSTSTAYMELSSLRSEDTAVYYCARRKVGKGVYYALDYWGQGTTVTVSS

SEQ ID NO: 950 - DNA, 366 bp, synthetic construct
  misc_feature 1..366: note = source = /note="Description of Artificial Sequence: Synthetic polynucleotide"
  source 1..366: mol_type = other DNA
caagtccaactcgtccaatcaggagcagaagtcaagaagcccggaagctctgtcaaagtgtcctgcaaggcctccggttacaccttcaccaactattggatgcactgggtcagacaggccccgggacagggcttggaatggatgggtttcatcactccaaccaccggttacccggagtacaaccagaagtttaaggaccgcgtgaccattactgccgacaagtccacgagcaccgcttacatggaacttagcagcctgcggtccgaggacactgccgtgtattactgcgcgcggaggaaggtcggaaagggagtgtactacgcactggactactggggccagggaaccaccgtgactgtgtcctcc

SEQ ID NO: 951 - protein, 11 aa, synthetic construct
  REGION 1..11: note = source = /note="Description of Artificial Sequence: Synthetic peptide"
RASGNIHNYLA

SEQ ID NO: 952 - protein, 7 aa, synthetic construct
  REGION 1..7: note = source = /note="Description of Artificial Sequence: Synthetic peptide"
NTKTLAD

SEQ ID NO: 953 - protein, 9 aa, synthetic construct
  REGION 1..9: note = source = /note="Description of Artificial Sequence: Synthetic peptide"
QHFWSSPWT

SEQ ID NO: 954 - protein, 7 aa, synthetic construct
  REGION 1..7: note = source = /note="Description of Artificial Sequence: Synthetic peptide"
SGNIHNY

SEQ ID NO: 955 - skipped

SEQ ID NO: 956 - protein, 6 aa, synthetic construct
  REGION 1..6: note = source = /note="Description of Artificial Sequence: Synthetic peptide"
FWSSPW

SEQ ID NO: 957 - protein, 6 aa, synthetic construct
  REGION 1..6: note = source = /note="Description of Artificial Sequence: Synthetic peptide"
GNIHNY

SEQ ID NO: 958 - skipped

SEQ ID NO: 959 - protein, 9 aa, synthetic construct
  REGION 1..9: note = source = /note="Description of Artificial Sequence: Synthetic peptide"
QHFWSSPWT

SEQ ID NO: 960 - protein, 11 aa, synthetic construct
  REGION 1..11: note = source = /note="Description of Artificial Sequence: Synthetic peptide"
RASGNIHNYLA

SEQ ID NO: 961 - protein, 7 aa, synthetic construct
  REGION 1..7: note = source = /note="Description of Artificial Sequence: Synthetic peptide"
NTKTLAD

SEQ ID NO: 962 - protein, 9 aa, synthetic construct
  REGION 1..9: note = source = /note="Description of Artificial Sequence: Synthetic peptide"
QHFWSSPWT

SEQ ID NO: 963 - protein, 107 aa, synthetic construct; identical to SEQ ID NO: 930
  REGION 1..107: note = source = /note="Description of Artificial Sequence: Synthetic polypeptide"

SEQ ID NO: 964 - DNA, 321 bp, synthetic construct
  misc_feature 1..321: note = source = /note="Description of Artificial Sequence: Synthetic polynucleotide"
  source 1..321: mol_type = other DNA
gatattcagatgacccagtccccttcatccctgagcgcctcagtgggcgatagagtgaccatcacttgtcgcgcctcgggcaatatccacaactacctcgcctggtaccagcagaagccgggaaaagtgcctaagctgctgatctacaacactaagaccctggcggatggagtgcccagccggttctccggctccggcagcggcacagactacaccctcaccatctcctcgctgcaaccagaggacgtggctacctactactgccagcatttctggtcgtccccctggactttcggaggggggaccaaagtggagattaag

SEQ ID NO: 965 - protein, 20 aa, synthetic construct
  REGION 1..20: note = source = /note="Description of Artificial Sequence: Synthetic peptide"
GGGGSGGGGSGGGGSGGGGS

SEQ ID NO: 966 - protein, 249 aa, synthetic construct
  REGION 1..249: note = source = /note="Description of Artificial Sequence: Synthetic polypeptide"
QVQLVQSGAEVKKPGSSVKVSCKASGYTFTNYWMHWVRQAPGQGLEWMGFITPTTGYPEYNQKFKDRVTITADKSTSTAYMELSSLRSEDTAVYYCARRKVGKGVYYALDYWGQGTTVTVSSGGGGSGGGGSGGGGSGGGGSDIQMTQSPSSLSASVGDRVTITCRASGNIHNYLAWYQQKPGKVPKLLIYNTKTLADGVPSRFSGSGSGTDYTLTISSLQPEDVATYYCQHFWSSPWTFGGGTKVEIK

SEQ ID NO: 967 - DNA, 747 bp, synthetic construct
  misc_feature 1..747: note = source = /note="Description of Artificial Sequence: Synthetic polynucleotide"
  source 1..747: mol_type = other DNA
caagtccaactcgtccaatcaggagcagaagtcaagaagcccggaagctctgtcaaagtgtcctgcaaggcctccggttacaccttcaccaactattggatgcactgggtcagacaggccccgggacagggcttggaatggatgggtttcatcactccaaccaccggttacccggagtacaaccagaagtttaaggaccgcgtgaccattactgccgacaagtccacgagcaccgcttacatggaacttagcagcctgcggtccgaggacactgccgtgtattactgcgcgcggaggaaggtcggaaagggagtgtactacgcactggactactggggccagggaaccaccgtgactgtgtcctccggtggcggagggtcgggaggggggggctcgggaggaggagggtccgggggcggtggctcagatattcagatgacccagtccccttcatccctgagcgcctcagtgggcgatagagtgaccatcacttgtcgcgcctcgggcaatatccacaactacctcgcctggtaccagcagaagccgggaaaagtgcctaagctgctgatctacaacactaagaccctggcggatggagtgcccagccggttctccggctccggcagcggcacagactacaccctcaccatctcctcgctgcaaccagaggacgtggctacctactactgccagcatttctggtcgtccccctggactttcggaggggggaccaaagtggagattaag

SEQ ID NO: 968 - protein, 493 aa, synthetic construct
  REGION 1..493: note = source = /note="Description of Artificial Sequence: Synthetic polypeptide"
MALPVTALLLPLALLLHAARPQVQLVQSGAEVKKPGSSVKVSCKASGYTFTNYWMHWVRQAPGQGLEWMGFITPTTGYPEYNQKFKDRVTITADKSTSTAYMELSSLRSEDTAVYYCARRKVGKGVYYALDYWGQGTTVTVSSGGGGSGGGGSGGGGSGGGGSDIQMTQSPSSLSASVGDRVTITCRASGNIHNYLAWYQQKPGKVPKLLIYNTKTLADGVPSRFSGSGSGTDYTLTISSLQPEDVATYYCQHFWSSPWTFGGGTKVEIKTTTPAPRPPTPAPTIASQPLSLRPEACRPAAGGAVHTRGLDFACDIYIWAPLAGTCGVLLLSLVITLYCKRGRKKLLYIFKQPFMRPVQTTQEEDGCSCRFPEEEEGGCELRVKFSRSADAPAYQQGQNQLYNELNLGRREEYDVLDKRRGRDPEMGGKPRRKNPQEGLYNELQKDKMAEAYSEIGMKGERRRGKGHDGLYQGLSTATKDTYDALHMQALPPR

SEQ ID NO: 969 - DNA, 1479 bp, synthetic construct
  misc_feature 1..1479: note = source = /note="Description of Artificial Sequence: Synthetic polynucleotide"
  source 1..1479: mol_type = other DNA
atggccctccctgtcaccgccctgctgcttccgctggctcttctgctccacgccgctcggccccaagtccaactcgtccaatcaggagcagaagtcaagaagcccggaagctctgtcaaagtgtcctgcaaggcctccggttacaccttcaccaactattggatgcactgggtcagacaggccccgggacagggcttggaatggatgggtttcatcactccaaccaccggttacccggagtacaaccagaagtttaaggaccgcgtgaccattactgccgacaagtccacgagcaccgcttacatggaacttagcagcctgcggtccgaggacactgccgtgtattactgcgcgcggaggaaggtcggaaagggagtgtactacgcactggactactggggccagggaaccaccgtgactgtgtcctccggtggcggagggtcgggaggggggggctcgggaggaggagggtccgggggcggtggctcagatattcagatgacccagtccccttcatccctgagcgcctcagtgggcgatagagtgaccatcacttgtcgcgcctcgggcaatatccacaactacctcgcctggtaccagcagaagccgggaaaagtgcctaagctgctgatctacaacactaagaccctggcggatggagtgcccagccggttctccggctccggcagcggcacagactacaccctcaccatctcctcgctgcaaccagaggacgtggctacctactactgccagcatttctggtcgtccccctggactttcggaggggggaccaaagtggagattaagaccactaccccagcaccgaggccacccaccccggctcctaccatcgcctcccagcctctgtccctgcgtccggaggcatgtagacccgcagctggtggggccgtgcatacccggggtcttgacttcgcctgcgatatctacatttgggcccctctggctggtacttgcggggtcctgctgctttcactcgtgatcactctttactgtaagcgcggtcggaagaagctgctgtacatctttaagcaacccttcatgaggcctgtgcagactactcaagaggaggacggctgttcatgccggttcccagaggaggaggaaggcggctgcgaactgcgcgtgaaattcagccgcagcgcagatgctccagcctaccagcaggggcagaaccagctctacaacgaactcaatcttggtcggagagaggagtacgacgtgctggacaagcggagaggacgggacccagaaatgggcgggaagccgcgcagaaagaatccccaagagggcctgtacaacgagctccaaaaggataagatggcagaagcctatagcgagattggtatgaaaggggaacgcagaagaggcaaaggccacgacggactgtaccagggactcagcaccgccaccaaggacacctatgacgctcttcacatgcaggccctgccgcctcgg

SEQ ID NO: 970 - protein, 5 aa, synthetic construct
  REGION 1..5: note = source = /note="Description of Artificial Sequence: Synthetic peptide"
NYWMH

SEQ ID NO: 971 - protein, 17 aa, synthetic construct
  REGION 1..17: note = source = /note="Description of Artificial Sequence: Synthetic peptide"
FITPTTGYPEYNQKFKD

SEQ ID NO: 972 - protein, 13 aa, synthetic construct
  REGION 1..13: note = source = /note="Description of Artificial Sequence: Synthetic peptide"
RKVGKGVYYALDY

SEQ ID NO: 973 - protein, 7 aa, synthetic construct
  REGION 1..7: note = source = /note="Description of Artificial Sequence: Synthetic peptide"
GYTFTNY

SEQ ID NO: 974 - protein, 6 aa, synthetic construct
  REGION 1..6: note = source = /note="Description of Artificial Sequence: Synthetic peptide"
TPTTGY

SEQ ID NO: 975 - protein, 13 aa, synthetic construct
  REGION 1..13: note = source = /note="Description of Artificial Sequence: Synthetic peptide"
RKVGKGVYYALDY

SEQ ID NO: 976 - protein, 8 aa, synthetic construct
  REGION 1..8: note = source = /note="Description of Artificial Sequence: Synthetic peptide"
GYTFTNYW

SEQ ID NO: 977 - protein, 8 aa, synthetic construct
  REGION 1..8: note = source = /note="Description of Artificial Sequence: Synthetic peptide"
ITPTTGYP

SEQ ID NO: 978 - protein, 15 aa, synthetic construct
  REGION 1..15: note = source = /note="Description of Artificial Sequence: Synthetic peptide"
ARRKVGKGVYYALDY

SEQ ID NO: 979 - protein, 10 aa, synthetic construct
  REGION 1..10: note = source = /note="Description of Artificial Sequence: Synthetic peptide"
GYTFTNYWMH

SEQ ID NO: 980 - protein, 17 aa, synthetic construct
  REGION 1..17: note = source = /note="Description of Artificial Sequence: Synthetic peptide"
FITPTTGYPEYNQKFKD

SEQ ID NO: 981 - protein, 13 aa, synthetic construct
  REGION 1..13: note = source = /note="Description of Artificial Sequence: Synthetic peptide"
RKVGKGVYYALDY

SEQ ID NO: 982 - protein, 122 aa, synthetic construct; identical to SEQ ID NO: 916
  REGION 1..122: note = source = /note="Description of Artificial Sequence: Synthetic polypeptide"

SEQ ID NO: 983 - DNA, 366 bp, synthetic construct
  misc_feature 1..366: note = source = /note="Description of Artificial Sequence: Synthetic polynucleotide"
  source 1..366: mol_type = other DNA
caagtccaactcgtccagtccggtgcagaagtcaagaaacccggagcttccgtgaaagtgtcctgcaaagcctccggttacacctttacgaactactggatgcattgggtgcgccaggccccgggacaggggctggaatggatgggcttcattacccccaccaccggataccccgagtacaatcagaagttcaaggaccgggtcaccatgaccgccgacaagtcaacctctactgcttacatggagctgtccagcctgcggtcggaagataccgccgtgtattactgcgcgagaaggaaagtcggaaagggagtgtactatgccctggactactggggacaggggaccactgtgactgtgtcaagc

SEQ ID NO: 984 - protein, 11 aa, synthetic construct
  REGION 1..11: note = source = /note="Description of Artificial Sequence: Synthetic peptide"
RASGNIHNYLA

SEQ ID NO: 985 - protein, 7 aa, synthetic construct
  REGION 1..7: note = source = /note="Description of Artificial Sequence: Synthetic peptide"
NTKTLAD

SEQ ID NO: 986 - protein, 9 aa, synthetic construct
  REGION 1..9: note = source = /note="Description of Artificial Sequence: Synthetic peptide"
QHFWSSPWT

SEQ ID NO: 987 - protein, 7 aa, synthetic construct
  REGION 1..7: note = source = /note="Description of Artificial Sequence: Synthetic peptide"
SGNIHNY

SEQ ID NO: 988 - skipped

SEQ ID NO: 989 - protein, 6 aa, synthetic construct
  REGION 1..6: note = source = /note="Description of Artificial Sequence: Synthetic peptide"
FWSSPW

SEQ ID NO: 990 - protein, 6 aa, synthetic construct
  REGION 1..6: note = source = /note="Description of Artificial Sequence: Synthetic peptide"
GNIHNY

SEQ ID NO: 991 - skipped

SEQ ID NO: 992 - protein, 9 aa, synthetic construct
  REGION 1..9: note = source = /note="Description of Artificial Sequence: Synthetic peptide"
QHFWSSPWT

SEQ ID NO: 993 - protein, 11 aa, synthetic construct
  REGION 1..11: note = source = /note="Description of Artificial Sequence: Synthetic peptide"
RASGNIHNYLA

SEQ ID NO: 994 - protein, 7 aa, synthetic construct
  REGION 1..7: note = source = /note="Description of Artificial Sequence: Synthetic peptide"
NTKTLAD

SEQ ID NO: 995 - protein, 9 aa, synthetic construct
  REGION 1..9: note = source = /note="Description of Artificial Sequence: Synthetic peptide"
QHFWSSPWT

SEQ ID NO: 996 - protein, 107 aa, synthetic construct
  REGION 1..107: note = source = /note="Description of Artificial Sequence: Synthetic polypeptide"
AIRMTQSPFSLSASVGDRVTITCRASGNIHNYLAWYQQKPAKAPKLFIYNTKTLADGVPSRFSGSGSGTDYTLTISSLQPEDFATYYCQHFWSSPWTFGGGTKVEIK

SEQ ID NO: 997 - DNA, 321 bp, synthetic construct
  misc_feature 1..321: note = source = /note="Description of Artificial Sequence: Synthetic polynucleotide"
  source 1..321: mol_type = other DNA
gcgatccgcatgacccagagcccgttctccctgtccgcgtccgtgggggaccgcgtgactatcacgtgtcgggcctccgggaacatccacaactacctcgcatggtaccagcagaagccggccaaggcccctaagttgttcatctacaacaccaagactcttgccgacggagtgccgtcccggtttagcggaagcggttccggcaccgactacaccctgactatctcgagcctgcaaccagaagatttcgccacttactactgccagcacttctggtcgtccccttggacattcggcggcggcaccaaggtcgagattaag

SEQ ID NO: 998 - protein, 20 aa, synthetic construct
  REGION 1..20: note = source = /note="Description of Artificial Sequence: Synthetic peptide"
GGGGSGGGGSGGGGSGGGGS

SEQ ID NO: 999 - protein, 249 aa, synthetic construct
  REGION 1..249: note = source = /note="Description of Artificial Sequence: Synthetic polypeptide"
QVQLVQSGAEVKKPGASVKVSCKASGYTFTNYWMHWVRQAPGQGLEWMGFITPTTGYPEYNQKFKDRVTMTADKSTSTAYMELSSLRSEDTAVYYCARRKVGKGVYYALDYWGQGTTVTVSSGGGGSGGGGSGGGGSGGGGSAIRMTQSPFSLSASVGDRVTITCRASGNIHNYLAWYQQKPAKAPKLFIYNTKTLADGVPSRFSGSGSGTDYTLTISSLQPEDFATYYCQHFWSSPWTFGGGTKVEIK

SEQ ID NO: 1000 - DNA, 747 bp, synthetic construct
  misc_feature 1..747: note = source = /note="Description of Artificial Sequence: Synthetic polynucleotide"
  source 1..747: mol_type = other DNA
caagtccaactcgtccagtccggtgcagaagtcaagaaacccggagcttccgtgaaagtgtcctgcaaagcctccggttacacctttacgaactactggatgcattgggtgcgccaggccccgggacaggggctggaatggatgggcttcattacccccaccaccggataccccgagtacaatcagaagttcaaggaccgggtcaccatgaccgccgacaagtcaacctctactgcttacatggagctgtccagcctgcggtcggaagataccgccgtgtattactgcgcgagaaggaaagtcggaaagggagtgtactatgccctggactactggggacaggggaccactgtgactgtgtcaagcggaggcggaggctcggggggcggaggttcgggcggaggaggatcagggggcggcggttccgcgatccgcatgacccagagcccgttctccctgtccgcgtccgtgggggaccgcgtgactatcacgtgtcgggcctccgggaacatccacaactacctcgcatggtaccagcagaagccggccaaggcccctaagttgttcatctacaacaccaagactcttgccgacggagtgccgtcccggtttagcggaagcggttccggcaccgactacaccctgactatctcgagcctgcaaccagaagatttcgccacttactactgccagcacttctggtcgtccccttggacattcggcggcggcaccaaggtcgagattaag

SEQ ID NO: 1001 - protein, 493 aa, synthetic construct
  REGION 1..493: note = source = /note="Description of Artificial Sequence: Synthetic polypeptide"
MALPVTALLLPLALLLHAARPQVQLVQSGAEVKKPGASVKVSCKASGYTFTNYWMHWVRQAPGQGLEWMGFITPTTGYPEYNQKFKDRVTMTADKSTSTAYMELSSLRSEDTAVYYCARRKVGKGVYYALDYWGQGTTVTVSSGGGGSGGGGSGGGGSGGGGSAIRMTQSPFSLSASVGDRVTITCRASGNIHNYLAWYQQKPAKAPKLFIYNTKTLADGVPSRFSGSGSGTDYTLTISSLQPEDFATYYCQHFWSSPWTFGGGTKVEIKTTTPAPRPPTPAPTIASQPLSLRPEACRPAAGGAVHTRGLDFACDIYIWAPLAGTCGVLLLSLVITLYCKRGRKKLLYIFKQPFMRPVQTTQEEDGCSCRFPEEEEGGCELRVKFSRSADAPAYQQGQNQLYNELNLGRREEYDVLDKRRGRDPEMGGKPRRKNPQEGLYNELQKDKMAEAYSEIGMKGERRRGKGHDGLYQGLSTATKDTYDALHMQALPPR

SEQ ID NO: 1002 - DNA, 1479 bp, synthetic construct
  misc_feature 1..1479: note = source = /note="Description of Artificial Sequence: Synthetic polynucleotide"
  source 1..1479: mol_type = other DNA
atggccctccctgtcaccgccctgctgcttccgctggctcttctgctccacgccgctcggccccaagtccaactcgtccagtccggtgcagaagtcaagaaacccggagcttccgtgaaagtgtcctgcaaagcctccggttacacctttacgaactactggatgcattgggtgcgccaggccccgggacaggggctggaatggatgggcttcattacccccaccaccggataccccgagtacaatcagaagttcaaggaccgggtcaccatgaccgccgacaagtcaacctctactgcttacatggagctgtccagcctgcggtcggaagataccgccgtgtattactgcgcgagaaggaaagtcggaaagggagtgtactatgccctggactactggggacaggggaccactgtgactgtgtcaagcggaggcggaggctcggggggcggaggttcgggcggaggaggatcagggggcggcggttccgcgatccgcatgacccagagcccgttctccctgtccgcgtccgtgggggaccgcgtgactatcacgtgtcgggcctccgggaacatccacaactacctcgcatggtaccagcagaagccggccaaggcccctaagttgttcatctacaacaccaagactcttgccgacggagtgccgtcccggtttagcggaagcggttccggcaccgactacaccctgactatctcgagcctgcaaccagaagatttcgccacttactactgccagcacttctggtcgtccccttggacattcggcggcggcaccaaggtcgagattaagaccactaccccagcaccgaggccacccaccccggctcctaccatcgcctcccagcctctgtccctgcgtccggaggcatgtagacccgcagctggtggggccgtgcatacccggggtcttgacttcgcctgcgatatctacatttgggcccctctggctggtacttgcggggtcctgctgctttcactcgtgatcactctttactgtaagcgcggtcggaagaagctgctgtacatctttaagcaacccttcatgaggcctgtgcagactactcaagaggaggacggctgttcatgccggttcccagaggaggaggaaggcggctgcgaactgcgcgtgaaattcagccgcagcgcagatgctccagcctaccagcaggggcagaaccagctctacaacgaactcaatcttggtcggagagaggagtacgacgtgctggacaagcggagaggacgggacccagaaatgggcgggaagccgcgcagaaagaatccccaagagggcctgtacaacgagctccaaaaggataagatggcagaagcctatagcgagattggtatgaaaggggaacgcagaagaggcaaaggccacgacggactgtaccagggactcagcaccgccaccaaggacacctatgacgctcttcacatgcaggccctgccgcctcgg

SEQ ID NO: 1003 - protein, 5 aa, synthetic construct
  REGION 1..5: note = source = /note="Description of Artificial Sequence: Synthetic peptide"
NYWMH

SEQ ID NO: 1004 - protein, 17 aa, synthetic construct
  REGION 1..17: note = source = /note="Description of Artificial Sequence: Synthetic peptide"
FITPTTGYPEYNQKFKD

SEQ ID NO: 1005 - protein, 13 aa, synthetic construct
  REGION 1..13: note = source = /note="Description of Artificial Sequence: Synthetic peptide"
RKVGKGVYYALDY

SEQ ID NO: 1006 - protein, 7 aa, synthetic construct
  REGION 1..7: note = source = /note="Description of Artificial Sequence: Synthetic peptide"
GYTFTNY

SEQ ID NO: 1007 - protein, 6 aa, synthetic construct
  REGION 1..6: note = source = /note="Description of Artificial Sequence: Synthetic peptide"
TPTTGY

SEQ ID NO: 1008 - protein, 13 aa, synthetic construct
  REGION 1..13: note = source = /note="Description of Artificial Sequence: Synthetic peptide"
RKVGKGVYYALDY

SEQ ID NO: 1009 - protein, 8 aa, synthetic construct
  REGION 1..8: note = source = /note="Description of Artificial Sequence: Synthetic peptide"
GYTFTNYW

SEQ ID NO: 1010 - protein, 8 aa, synthetic construct
  REGION 1..8: note = source = /note="Description of Artificial Sequence: Synthetic peptide"
ITPTTGYP

SEQ ID NO: 1011 - protein, 15 aa, synthetic construct
  REGION 1..15: note = source = /note="Description of Artificial Sequence: Synthetic peptide"
ARRKVGKGVYYALDY

SEQ ID NO: 1012 - protein, 10 aa, synthetic construct
  REGION 1..10: note = source = /note="Description of Artificial Sequence: Synthetic peptide"
GYTFTNYWMH

SEQ ID NO: 1013 - protein, 17 aa, synthetic construct
  REGION 1..17: note = source = /note="Description of Artificial Sequence: Synthetic peptide"
FITPTTGYPEYNQKFKD

SEQ ID NO: 1014 - protein, 13 aa, synthetic construct
  REGION 1..13: note = source = /note="Description of Artificial Sequence: Synthetic peptide"
RKVGKGVYYALDY

SEQ ID NO: 1015 - protein, 122 aa, synthetic construct; identical to SEQ ID NO: 949
  REGION 1..122: note = source = /note="Description of Artificial Sequence: Synthetic polypeptide"

SEQ ID NO: 1016 - DNA, 366 bp, synthetic construct
  misc_feature 1..366: note = source = /note="Description of Artificial Sequence: Synthetic polynucleotide"
  source 1..366: mol_type = other DNA
caagtccaactcgtccaaagcggtgcagaagtcaagaagcccggttcctccgtgaaagtgtcctgcaaagcctcgggctacaccttcactaattactggatgcattgggtccgccaggcgcccggacagggattggaatggatggggttcatcacgccgaccaccggatacccggagtacaaccagaagttcaaggacagagtgaccattaccgccgataagtccacctccaccgcttacatggagctctcctcactgcggtccgaagatacagccgtgtactattgtgctcgccggaaagtcggaaagggagtgtactacgccctggactattggggccagggcaccaccgtgaccgtgtcctcg

SEQ ID NO: 1017 - protein, 11 aa, synthetic construct
  REGION 1..11: note = source = /note="Description of Artificial Sequence: Synthetic peptide"
RASGNIHNYLA

SEQ ID NO: 1018 - protein, 7 aa, synthetic construct
  REGION 1..7: note = source = /note="Description of Artificial Sequence: Synthetic peptide"
NTKTLAD

SEQ ID NO: 1019 - protein, 9 aa, synthetic construct
  REGION 1..9: note = source = /note="Description of Artificial Sequence: Synthetic peptide"
QHFWSSPWT

SEQ ID NO: 1020 - protein, 7 aa, synthetic construct
  REGION 1..7: note = source = /note="Description of Artificial Sequence: Synthetic peptide"
SGNIHNY

SEQ ID NO: 1021 - skipped

SEQ ID NO: 1022 - protein, 6 aa, synthetic construct
  REGION 1..6: note = source = /note="Description of Artificial Sequence: Synthetic peptide"
FWSSPW

SEQ ID NO: 1023 - protein, 6 aa, synthetic construct
  REGION 1..6: note = source = /note="Description of Artificial Sequence: Synthetic peptide"
GNIHNY

SEQ ID NO: 1024 - skipped

SEQ ID NO: 1025 - protein, 9 aa, synthetic construct
  REGION 1..9: note = source = /note="Description of Artificial Sequence: Synthetic peptide"
QHFWSSPWT

SEQ ID NO: 1026 - protein, 11 aa, synthetic construct
  REGION 1..11: note = source = /note="Description of Artificial Sequence: Synthetic peptide"
RASGNIHNYLA

SEQ ID NO: 1027 - protein, 7 aa, synthetic construct
  REGION 1..7: note = source = /note="Description of Artificial Sequence: Synthetic peptide"
NTKTLAD

SEQ ID NO: 1028 - protein, 9 aa, synthetic construct
  REGION 1..9: note = source = /note="Description of Artificial Sequence: Synthetic peptide"
QHFWSSPWT

SEQ ID NO: 1029 - protein, 107 aa, synthetic construct; identical to SEQ ID NO: 996
  REGION 1..107: note = source = /note="Description of Artificial Sequence: Synthetic polypeptide"

SEQ ID NO: 1030 - DNA, 321 bp, synthetic construct
  misc_feature 1..321: note = source = /note="Description of Artificial Sequence: Synthetic polynucleotide"
  source 1..321: mol_type = other DNA
gccattaggatgactcagtcccctttctccctctccgcgagcgtgggcgaccgcgtgacgatcacttgccgggcctcggggaacattcacaactacctggcctggtaccagcagaagccggccaaggcccctaagctgttcatctacaacaccaagacccttgcggacggagtgccatcgagattttccggctcgggctctgggaccgattacactctgactatctcaagcctgcaacctgaggacttcgccacttactactgccagcacttctggagcagcccctggactttcggtggcgggaccaaggtcgaaatcaag

SEQ ID NO: 1031 - protein, 20 aa, synthetic construct
  REGION 1..20: note = source = /note="Description of Artificial Sequence: Synthetic peptide"
GGGGSGGGGSGGGGSGGGGS

SEQ ID NO: 1032 - protein, 249 aa, synthetic construct
  REGION 1..249: note = source = /note="Description of Artificial Sequence: Synthetic polypeptide"
QVQLVQSGAEVKKPGSSVKVSCKASGYTFTNYWMHWVRQAPGQGLEWMGFITPTTGYPEYNQKFKDRVTITADKSTSTAYMELSSLRSEDTAVYYCARRKVGKGVYYALDYWGQGTTVTVSSGGGGSGGGGSGGGGSGGGGSAIRMTQSPFSLSASVGDRVTITCRASGNIHNYLAWYQQKPAKAPKLFIYNTKTLADGVPSRFSGSGSGTDYTLTISSLQPEDFATYYCQHFWSSPWTFGGGTKVEIK

SEQ ID NO: 1033 - DNA, 747 bp, synthetic construct
  misc_feature 1..747: note = source = /note="Description of Artificial Sequence: Synthetic polynucleotide"
  source 1..747: mol_type = other DNA
caagtccaactcgtccaaagcggtgcagaagtcaagaagcccggttcctccgtgaaagtgtcctgcaaagcctcgggctacaccttcactaattactggatgcattgggtccgccaggcgcccggacagggattggaatggatggggttcatcacgccgaccaccggatacccggagtacaaccagaagttcaaggacagagtgaccattaccgccgataagtccacctccaccgcttacatggagctctcctcactgcggtccgaagatacagccgtgtactattgtgctcgccggaaagtcggaaagggagtgtactacgccctggactattggggccagggcaccaccgtgaccgtgtcctcgggaggagggggttcgggcggaggcggctccggtggaggcggaagcggagggggcggatcagccattaggatgactcagtcccctttctccctctccgcgagcgtgggcgaccgcgtgacgatcacttgccgggcctcggggaacattcacaactacctggcctggtaccagcagaagccggccaaggcccctaagctgttcatctacaacaccaagacccttgcggacggagtgccatcgagattttccggctcgggctctgggaccgattacactctgactatctcaagcctgcaacctgaggacttcgccacttactactgccagcacttctggagcagcccctggactttcggtggcgggaccaaggtcgaaatcaag

SEQ ID NO: 1034 - protein, 493 aa, synthetic construct
  REGION 1..493: note = source = /note="Description of Artificial Sequence: Synthetic polypeptide"
MALPVTALLLPLALLLHAARPQVQLVQSGAEVKKPGSSVKVSCKASGYTFTNYWMHWVRQAPGQGLEWMGFITPTTGYPEYNQKFKDRVTITADKSTSTAYMELSSLRSEDTAVYYCARRKVGKGVYYALDYWGQGTTVTVSSGGGGSGGGGSGGGGSGGGGSAIRMTQSPFSLSASVGDRVTITCRASGNIHNYLAWYQQKPAKAPKLFIYNTKTLADGVPSRFSGSGSGTDYTLTISSLQPEDFATYYCQHFWSSPWTFGGGTKVEIKTTTPAPRPPTPAPTIASQPLSLRPEACRPAAGGAVHTRGLDFACDIYIWAPLAGTCGVLLLSLVITLYCKRGRKKLLYIFKQPFMRPVQTTQEEDGCSCRFPEEEEGGCELRVKFSRSADAPAYQQGQNQLYNELNLGRREEYDVLDKRRGRDPEMGGKPRRKNPQEGLYNELQKDKMAEAYSEIGMKGERRRGKGHDGLYQGLSTATKDTYDALHMQALPPR

SEQ ID NO: 1035 - DNA, 1479 bp, synthetic construct
  misc_feature 1..1479: note = source = /note="Description of Artificial Sequence: Synthetic polynucleotide"
  source 1..1479: mol_type = other DNA
atggccctccctgtcaccgccctgctgcttccgctggctcttctgctccacgccgctcggccccaagtccaactcgtccaaagcggtgcagaagtcaagaagcccggttcctccgtgaaagtgtcctgcaaagcctcgggctacaccttcactaattactggatgcattgggtccgccaggcgcccggacagggattggaatggatggggttcatcacgccgaccaccggatacccggagtacaaccagaagttcaaggacagagtgaccattaccgccgataagtccacctccaccgcttacatggagctctcctcactgcggtccgaagatacagccgtgtactattgtgctcgccggaaagtcggaaagggagtgtactacgccctggactattggggccagggcaccaccgtgaccgtgtcctcgggaggagggggttcgggcggaggcggctccggtggaggcggaagcggagggggcggatcagccattaggatgactcagtcccctttctccctctccgcgagcgtgggcgaccgcgtgacgatcacttgccgggcctcggggaacattcacaactacctggcctggtaccagcagaagccggccaaggcccctaagctgttcatctacaacaccaagacccttgcggacggagtgccatcgagattttccggctcgggctctgggaccgattacactctgactatctcaagcctgcaacctgaggacttcgccacttactactgccagcacttctggagcagcccctggactttcggtggcgggaccaaggtcgaaatcaagaccactaccccagcaccgaggccacccaccccggctcctaccatcgcctcccagcctctgtccctgcgtccggaggcatgtagacccgcagctggtggggccgtgcatacccggggtcttgacttcgcctgcgatatctacatttgggcccctctggctggtacttgcggggtcctgctgctttcactcgtgatcactctttactgtaagcgcggtcggaagaagctgctgtacatctttaagcaacccttcatgaggcctgtgcagactactcaagaggaggacggctgttcatgccggttcccagaggaggaggaaggcggctgcgaactgcgcgtgaaattcagccgcagcgcagatgctccagcctaccagcaggggcagaaccagctctacaacgaactcaatcttggtcggagagaggagtacgacgtgctggacaagcggagaggacgggacccagaaatgggcgggaagccgcgcagaaagaatccccaagagggcctgtacaacgagctccaaaaggataagatggcagaagcctatagcgagattggtatgaaaggggaacgcagaagaggcaaaggccacgacggactgtaccagggactcagcaccgccaccaaggacacctatgacgctcttcacatgcaggccctgccgcctcgg

SEQ ID NO: 1036 - protein, 5 aa, synthetic construct
  REGION 1..5: note = source = /note="Description of Artificial Sequence: Synthetic peptide"
NYNLH

SEQ ID NO: 1037 - protein, 17 aa, synthetic construct
  REGION 1..17: note = source = /note="Description of Artificial Sequence: Synthetic peptide"
AIYPGNYDTSYNQKFKG

SEQ ID NO: 1038 - protein, 13 aa, synthetic construct
  REGION 1..13: note = source = /note="Description of Artificial Sequence: Synthetic peptide"
VDFGHSRYWYFDV

SEQ ID NO: 1039 - protein, 7 aa, synthetic construct
  REGION 1..7: note = source = /note="Description of Artificial Sequence: Synthetic peptide"
GYTFTNY

SEQ ID NO: 1040 - protein, 6 aa, synthetic construct
  REGION 1..6: note = source = /note="Description of Artificial Sequence: Synthetic peptide"
YPGNYD

SEQ ID NO: 1041 - protein, 13 aa, synthetic construct
  REGION 1..13: note = source = /note="Description of Artificial Sequence: Synthetic peptide"
VDFGHSRYWYFDV

SEQ ID NO: 1042 - protein, 8 aa, synthetic construct
  REGION 1..8: note = source = /note="Description of Artificial Sequence: Synthetic peptide"
GYTFTNYN

SEQ ID NO: 1043 - protein, 8 aa, synthetic construct
  REGION 1..8: note = source = /note="Description of Artificial Sequence: Synthetic peptide"
IYPGNYDT

SEQ ID NO: 1044 - protein, 15 aa, synthetic construct
  REGION 1..15: note = source = /note="Description of Artificial Sequence: Synthetic peptide"
ARVDFGHSRYWYFDV

SEQ ID NO: 1045 - protein, 10 aa, synthetic construct
  REGION 1..10: note = source = /note="Description of Artificial Sequence: Synthetic peptide"
GYTFTNYNLH

SEQ ID NO: 1046 - protein, 17 aa, synthetic construct
  REGION 1..17: note = source = /note="Description of Artificial Sequence: Synthetic peptide"
AIYPGNYDTSYNQKFKG

SEQ ID NO: 1047 - protein, 13 aa, synthetic construct
  REGION 1..13: note = source = /note="Description of Artificial Sequence: Synthetic peptide"
VDFGHSRYWYFDV

SEQ ID NO: 1048 - protein, 122 aa, synthetic construct; identical to SEQ ID NO: 850
  REGION 1..122: note = source = /note="Description of Artificial Sequence: Synthetic polypeptide"

SEQ ID NO: 1049 - DNA, 366 bp, synthetic construct
  misc_feature 1..366: note = source = /note="Description of Artificial Sequence: Synthetic polynucleotide"
  source 1..366: mol_type = other DNA
caagtccaactcgtccaatccggtgcagaagtcaagaaacccggtgcatccgtgaaagtgtcatgcaaagcctccgggtacaccttcactaactacaacctccactgggtccgccaggccccgggacagggactggagtggatgggggccatctacccgggaaactacgacacttcatacaaccagaagttcaagggcagagtgaccatgactgccgacaagagcacatcgaccgcctacatggaactcagctccctgcgctccgaggatactgccgtctactactgtgcccgggtggacttcggccactcccggtattggtatttcgatgtctggggacagggaaccaccgtgactgtgtccagc

SEQ ID NO: 1050 - protein, 10 aa, synthetic construct
  REGION 1..10: note = source = /note="Description of Artificial Sequence: Synthetic peptide"
RATSSVSSMN

SEQ ID NO: 1051 - protein, 7 aa, synthetic construct
  REGION 1..7: note = source = /note="Description of Artificial Sequence: Synthetic peptide"
ATSNLAS

SEQ ID NO: 1052 - protein, 9 aa, synthetic construct
  REGION 1..9: note = source = /note="Description of Artificial Sequence: Synthetic peptide"
QQWTFNPPT

SEQ ID NO: 1053 - protein, 6 aa, synthetic construct
  REGION 1..6: note = source = /note="Description of Artificial Sequence: Synthetic peptide"
TSSVSS

SEQ ID NO: 1054 - skipped

SEQ ID NO: 1055 - protein, 6 aa, synthetic construct
  REGION 1..6: note = source = /note="Description of Artificial Sequence: Synthetic peptide"
WTFNPP

SEQ ID NO: 1056 - protein, 5 aa, synthetic construct
  REGION 1..5: note = source = /note="Description of Artificial Sequence: Synthetic peptide"
SSVSS

SEQ ID NO: 1057 - skipped

SEQ ID NO: 1058 - protein, 9 aa, synthetic construct
  REGION 1..9: note = source = /note="Description of Artificial Sequence: Synthetic peptide"
QQWTFNPPT

SEQ ID NO: 1059 - protein, 10 aa, synthetic construct
  REGION 1..10: note = source = /note="Description of Artificial Sequence: Synthetic peptide"
RATSSVSSMN

SEQ ID NO: 1060 - protein, 7 aa, synthetic construct
  REGION 1..7: note = source = /note="Description of Artificial Sequence: Synthetic peptide"
ATSNLAS

SEQ ID NO: 1061 - protein, 9 aa, synthetic construct
  REGION 1..9: note = source = /note="Description of Artificial Sequence: Synthetic peptide"
QQWTFNPPT

SEQ ID NO: 1062 - protein, 106 aa, synthetic construct
  REGION 1..106: note = source = /note="Description of Artificial Sequence: Synthetic polypeptide"
EIVLTQSPATLSLSPGERATLSCRATSSVSSMNWYQQKPGQAPRPLIHATSNLASGIPARFSGSGSGTDYTLTISSLEPEDAAVYYCQQWTFNPPTFGQGTKLEIK

SEQ ID NO: 1063 - DNA, 318 bp, synthetic construct
  misc_feature 1..318: note = source = /note="Description of Artificial Sequence: Synthetic polynucleotide"
  source 1..318: mol_type = other DNA
gaaatcgtgctgacccagtcccctgcgactctgagcctgagccctggggaacgcgccactttgtcatgccgggccacctcctccgtgtcctccatgaactggtaccagcagaagcccggacaggctccgcggccgctgatccatgccacctccaacctggccagcggcattcccgcgaggttttccggctcgggctctggtaccgactacaccctgaccatctcgagccttgagccagaagatgctgcggtgtactactgccaacagtggaccttcaatccgcctacgttcggacaggggaccaagctggagattaag

SEQ ID NO: 1064 - protein, 20 aa, synthetic construct
  REGION 1..20: note = source = /note="Description of Artificial Sequence: Synthetic peptide"
GGGGSGGGGSGGGGSGGGGS

SEQ ID NO: 1065 - protein, 248 aa, synthetic construct
  REGION 1..248: note = source = /note="Description of Artificial Sequence: Synthetic polypeptide"
QVQLVQSGAEVKKPGASVKVSCKASGYTFTNYNLHWVRQAPGQGLEWMGAIYPGNYDTSYNQKFKGRVTMTADKSTSTAYMELSSLRSEDTAVYYCARVDFGHSRYWYFDVWGQGTTVTVSSGGGGSGGGGSGGGGSGGGGSEIVLTQSPATLSLSPGERATLSCRATSSVSSMNWYQQKPGQAPRPLIHATSNLASGIPARFSGSGSGTDYTLTISSLEPEDAAVYYCQQWTFNPPTFGQGTKLEIK

SEQ ID NO: 1066 - DNA, 744 bp, synthetic construct
  misc_feature 1..744: note = source = /note="Description of Artificial Sequence: Synthetic polynucleotide"
  source 1..744: mol_type = other DNA
caagtccaactcgtccaatccggtgcagaagtcaagaaacccggtgcatccgtgaaagtgtcatgcaaagcctccgggtacaccttcactaactacaacctccactgggtccgccaggccccgggacagggactggagtggatgggggccatctacccgggaaactacgacacttcatacaaccagaagttcaagggcagagtgaccatgactgccgacaagagcacatcgaccgcctacatggaactcagctccctgcgctccgaggatactgccgtctactactgtgcccgggtggacttcggccactcccggtattggtatttcgatgtctggggacagggaaccaccgtgactgtgtccagcgggggcggaggatcgggtggcggaggttcggggggaggaggatcaggcggcggcggatcggaaatcgtgctgacccagtcccctgcgactctgagcctgagccctggggaacgcgccactttgtcatgccgggccacctcctccgtgtcctccatgaactggtaccagcagaagcccggacaggctccgcggccgctgatccatgccacctccaacctggccagcggcattcccgcgaggttttccggctcgggctctggtaccgactacaccctgaccatctcgagccttgagccagaagatgctgcggtgtactactgccaacagtggaccttcaatccgcctacgttcggacaggggaccaagctggagattaag

SEQ ID NO: 1067 - protein, 492 aa, synthetic construct
  REGION 1..492: note = source = /note="Description of Artificial Sequence: Synthetic polypeptide"
MALPVTALLLPLALLLHAARPQVQLVQSGAEVKKPGASVKVSCKASGYTFTNYNLHWVRQAPGQGLEWMGAIYPGNYDTSYNQKFKGRVTMTADKSTSTAYMELSSLRSEDTAVYYCARVDFGHSRYWYFDVWGQGTTVTVSSGGGGSGGGGSGGGGSGGGGSEIVLTQSPATLSLSPGERATLSCRATSSVSSMNWYQQKPGQAPRPLIHATSNLASGIPARFSGSGSGTDYTLTISSLEPEDAAVYYCQQWTFNPPTFGQGTKLEIKTTTPAPRPPTPAPTIASQPLSLRPEACRPAAGGAVHTRGLDFACDIYIWAPLAGTCGVLLLSLVITLYCKRGRKKLLYIFKQPFMRPVQTTQEEDGCSCRFPEEEEGGCELRVKFSRSADAPAYQQGQNQLYNELNLGRREEYDVLDKRRGRDPEMGGKPRRKNPQEGLYNELQKDKMAEAYSEIGMKGERRRGKGHDGLYQGLSTATKDTYDALHMQALPPR

SEQ ID NO: 1068 - DNA, 1476 bp, synthetic construct
  misc_feature 1..1476: note = source = /note="Description of Artificial Sequence: Synthetic polynucleotide"
  source 1..1476: mol_type = other DNA
atggccctccctgtcaccgccctgctgcttccgctggctcttctgctccacgccgctcggccccaagtccaactcgtccaatccggtgcagaagtcaagaaacccggtgcatccgtgaaagtgtcatgcaaagcctccgggtacaccttcactaactacaacctccactgggtccgccaggccccgggacagggactggagtggatgggggccatctacccgggaaactacgacacttcatacaaccagaagttcaagggcagagtgaccatgactgccgacaagagcacatcgaccgcctacatggaactcagctccctgcgctccgaggatactgccgtctactactgtgcccgggtggacttcggccactcccggtattggtatttcgatgtctggggacagggaaccaccgtgactgtgtccagcgggggcggaggatcgggtggcggaggttcggggggaggaggatcaggcggcggcggatcggaaatcgtgctgacccagtcccctgcgactctgagcctgagccctggggaacgcgccactttgtcatgccgggccacctcctccgtgtcctccatgaactggtaccagcagaagcccggacaggctccgcggccgctgatccatgccacctccaacctggccagcggcattcccgcgaggttttccggctcgggctctggtaccgactacaccctgaccatctcgagccttgagccagaagatgctgcggtgtactactgccaacagtggaccttcaatccgcctacgttcggacaggggaccaagctggagattaagaccactaccccagcaccgaggccacccaccccggctcctaccatcgcctcccagcctctgtccctgcgtccggaggcatgtagacccgcagctggtggggccgtgcatacccggggtcttgacttcgcctgcgatatctacatttgggcccctctggctggtacttgcggggtcctgctgctttcactcgtgatcactctttactgtaagcgcggtcggaagaagctgctgtacatctttaagcaacccttcatgaggcctgtgcagactactcaagaggaggacggctgttcatgccggttcccagaggaggaggaaggcggctgcgaactgcgcgtgaaattcagccgcagcgcagatgctccagcctaccagcaggggcagaaccagctctacaacgaactcaatcttggtcggagagaggagtacgacgtgctggacaagcggagaggacgggacccagaaatgggcgggaagccgcgcagaaagaatccccaagagggcctgtacaacgagctccaaaaggataagatggcagaagcctatagcgagattggtatgaaaggggaacgcagaagaggcaaaggccacgacggactgtaccagggactcagcaccgccaccaaggacacctatgacgctcttcacatgcaggccctgccgcctcgg

SEQ ID NO: 1069 - protein, 5 aa, synthetic construct
  REGION 1..5: note = source = /note="Description of Artificial Sequence: Synthetic peptide"
NYNLH

SEQ ID NO: 1070 - protein, 17 aa, synthetic construct
  REGION 1..17: note = source = /note="Description of Artificial Sequence: Synthetic peptide"
AIYPGNYDTSYNQKFKG

SEQ ID NO: 1071 - protein, 13 aa, synthetic construct
  REGION 1..13: note = source = /note="Description of Artificial Sequence: Synthetic peptide"
VDFGHSRYWYFDV

SEQ ID NO: 1072 - protein, 7 aa, synthetic construct
  REGION 1..7: note = source = /note="Description of Artificial Sequence: Synthetic peptide"
GYTFTNY

SEQ ID NO: 1073 - protein, 6 aa, synthetic construct
  REGION 1..6: note = source = /note="Description of Artificial Sequence: Synthetic peptide"
YPGNYD

SEQ ID NO: 1074 - protein, 13 aa, synthetic construct
  REGION 1..13: note = source = /note="Description of Artificial Sequence: Synthetic peptide"
VDFGHSRYWYFDV

SEQ ID NO: 1075 - protein, 8 aa, synthetic construct
  REGION 1..8: note = source = /note="Description of Artificial Sequence: Synthetic peptide"
GYTFTNYN

SEQ ID NO: 1076 - protein, 8 aa, synthetic construct
  REGION 1..8: note = source = /note="Description of Artificial Sequence: Synthetic peptide"
IYPGNYDT

SEQ ID NO: 1077 - protein, 15 aa, synthetic construct
  REGION 1..15: note = source = /note="Description of Artificial Sequence: Synthetic peptide"
ARVDFGHSRYWYFDV

SEQ ID NO: 1078 - protein, 122 aa, synthetic construct; identical to SEQ ID NO: 916
  REGION 1..122: note = source = /note="Description of Artificial Sequence: Synthetic polypeptide"

SEQ ID NO: 1079 - DNA, 366 bp, synthetic construct
  misc_feature 1..366: note = source = /note="Description of Artificial Sequence: Synthetic polynucleotide"
  source 1..366: mol_type = other DNA
caagtccaactcgtccagtcgggagcagaagtcaagaagcccggatcatccgtgaaagtgtcctgcaaagcctcaggctacacctttaccaactacaacttgcactgggtcagacaggccccgggacagggcctggagtggatgggcgccatctaccccggaaactatgacacctcgtacaaccagaagttcaagggtcgcgtgactatcacggctgacaagtccactagcaccgcgtacatggaactttcctcactgcggtccgaggatactgcggtgtactactgcgcccgggtggacttcggacactcgagatattggtacttcgatgtctggggacaggggaccaccgtgactgtgtcctcc

SEQ ID NO: 1080 - protein, 10 aa, synthetic construct
  REGION 1..10: note = source = /note="Description of Artificial Sequence: Synthetic peptide"
RATSSVSSMN

SEQ ID NO: 1081 - protein, 7 aa, synthetic construct
  REGION 1..7: note = source = /note="Description of Artificial Sequence: Synthetic peptide"
ATSNLAS

SEQ ID NO: 1082 - protein, 9 aa, synthetic construct
  REGION 1..9: note = source = /note="Description of Artificial Sequence: Synthetic peptide"
QQWTFNPPT

SEQ ID NO: 1083 - protein, 6 aa, synthetic construct
  REGION 1..6: note = source = /note="Description of Artificial Sequence: Synthetic peptide"
TSSVSS

SEQ ID NO: 1084 - skipped

SEQ ID NO: 1085 - protein, 6 aa, synthetic construct
  REGION 1..6: note = source = /note="Description of Artificial Sequence: Synthetic peptide"
WTFNPP

SEQ ID NO: 1086 - protein, 5 aa, synthetic construct
  REGION 1..5: note = source = /note="Description of Artificial Sequence: Synthetic peptide"
SSVSS

SEQ ID NO: 1087 - skipped

SEQ ID NO: 1088 - protein, 9 aa, synthetic construct
  REGION 1..9: note = source = /note="Description of Artificial Sequence: Synthetic peptide"
QQWTFNPPT

SEQ ID NO: 1089 - protein, 10 aa, synthetic construct
  REGION 1..10: note = source = /note="Description of Artificial Sequence: Synthetic peptide"
RATSSVSSMN

SEQ ID NO: 1090 - protein, 7 aa, synthetic construct
  REGION 1..7: note = source = /note="Description of Artificial Sequence: Synthetic peptide"
ATSNLAS

SEQ ID NO: 1091 - protein, 9 aa, synthetic construct
  REGION 1..9: note = source = /note="Description of Artificial Sequence: Synthetic peptide"
QQWTFNPPT

SEQ ID NO: 1092 - protein, 107 aa, synthetic construct; identical to SEQ ID NO: 996
  REGION 1..107: note = source = /note="Description of Artificial Sequence: Synthetic polypeptide"

SEQ ID NO: 1093 - DNA, 318 bp, synthetic construct
  misc_feature 1..318: note = source = /note="Description of Artificial Sequence: Synthetic polynucleotide"
  source 1..318: mol_type = other DNA
gaaattgtgctgacccagtctcccgcaaccctgtccctgagccctggagagcgcgccaccctgtcctgccgggccacatcctccgtgtcgtccatgaactggtaccagcagaagcccggccaagccccgaggcctctgattcatgctacctcaaatctggccagcggaatcccggcgcgcttctccggctcgggcagcggtactgactacactctcaccatctcgtccctcgaaccggaggacgccgccgtctactactgtcagcagtggaccttcaacccacctactttcggacaagggaccaagctggagatcaag

SEQ ID NO: 1094 - protein, 19 aa, synthetic construct
  REGION 1..19: note = source = /note="Description of Artificial Sequence: Synthetic peptide"
GGGSGGGGSGGGGSGGGGS

SEQ ID NO: 1095 - protein, 249 aa, synthetic construct; identical to SEQ ID NO: 999
  REGION 1..249: note = source = /note="Description of Artificial Sequence: Synthetic polypeptide"

SEQ ID NO: 1096 - DNA, 744 bp, synthetic construct
  misc_feature 1..744: note = source = /note="Description of Artificial Sequence: Synthetic polynucleotide"
  source 1..744: mol_type = other DNA
caagtccaactcgtccagtcgggagcagaagtcaagaagcccggatcatccgtgaaagtgtcctgcaaagcctcaggctacacctttaccaactacaacttgcactgggtcagacaggccccgggacagggcctggagtggatgggcgccatctaccccggaaactatgacacctcgtacaaccagaagttcaagggtcgcgtgactatcacggctgacaagtccactagcaccgcgtacatggaactttcctcactgcggtccgaggatactgcggtgtactactgcgcccgggtggacttcggacactcgagatattggtacttcgatgtctggggacaggggaccaccgtgactgtgtcctccgggggcggtggcagcgggggaggcggaagcggcggagggggttccgggggtggaggaagcgaaattgtgctgacccagtctcccgcaaccctgtccctgagccctggagagcgcgccaccctgtcctgccgggccacatcctccgtgtcgtccatgaactggtaccagcagaagcccggccaagccccgaggcctctgattcatgctacctcaaatctggccagcggaatcccggcgcgcttctccggctcgggcagcggtactgactacactctcaccatctcgtccctcgaaccggaggacgccgccgtctactactgtcagcagtggaccttcaacccacctactttcggacaagggaccaagctggagatcaag

SEQ ID NO: 1097 - protein, 492 aa, synthetic construct
  REGION 1..492: note = source = /note="Description of Artificial Sequence: Synthetic polypeptide"
MALPVTALLLPLALLLHAARPQVQLVQSGAEVKKPGSSVKVSCKASGYTFTNYNLHWVRQAPGQGLEWMGAIYPGNYDTSYNQKFKGRVTITADKSTSTAYMELSSLRSEDTAVYYCARVDFGHSRYWYFDVWGQGTTVTVSSGGGGSGGGGSGGGGSGGGGSEIVLTQSPATLSLSPGERATLSCRATSSVSSMNWYQQKPGQAPRPLIHATSNLASGIPARFSGSGSGTDYTLTISSLEPEDAAVYYCQQWTFNPPTFGQGTKLEIKTTTPAPRPPTPAPTIASQPLSLRPEACRPAAGGAVHTRGLDFACDIYIWAPLAGTCGVLLLSLVITLYCKRGRKKLLYIFKQPFMRPVQTTQEEDGCSCRFPEEEEGGCELRVKFSRSADAPAYQQGQNQLYNELNLGRREEYDVLDKRRGRDPEMGGKPRRKNPQEGLYNELQKDKMAEAYSEIGMKGERRRGKGHDGLYQGLSTATKDTYDALHMQALPPR

SEQ ID NO: 1098 - DNA, 1476 bp, synthetic construct
  misc_feature 1..1476: note = source = /note="Description of Artificial Sequence: Synthetic polynucleotide"
  source 1..1476: mol_type = other DNA
atggccctccctgtcaccgccctgctgcttccgctggctcttctgctccacgccgctcggccccaagtccaactcgtccagtcgggagcagaagtcaagaagcccggatcatccgtgaaagtgtcctgcaaagcctcaggctacacctttaccaactacaacttgcactgggtcagacaggccccgggacagggcctggagtggatgggcgccatctaccccggaaactatgacacctcgtacaaccagaagttcaagggtcgcgtgactatcacggctgacaagtccactagcaccgcgtacatggaactttcctcactgcggtccgaggatactgcggtgtactactgcgcccgggtggacttcggacactcgagatattggtacttcgatgtctggggacaggggaccaccgtgactgtgtcctccgggggcggtggcagcgggggaggcggaagcggcggagggggttccgggggtggaggaagcgaaattgtgctgacccagtctcccgcaaccctgtccctgagccctggagagcgcgccaccctgtcctgccgggccacatcctccgtgtcgtccatgaactggtaccagcagaagcccggccaagccccgaggcctctgattcatgctacctcaaatctggccagcggaatcccggcgcgcttctccggctcgggcagcggtactgactacactctcaccatctcgtccctcgaaccggaggacgccgccgtctactactgtcagcagtggaccttcaacccacctactttcggacaagggaccaagctggagatcaagaccactaccccagcaccgaggccacccaccccggctcctaccatcgcctcccagcctctgtccctgcgtccggaggcatgtagacccgcagctggtggggccgtgcatacccggggtcttgacttcgcctgcgatatctacatttgggcccctctggctggtacttgcggggtcctgctgctttcactcgtgatcactctttactgtaagcgcggtcggaagaagctgctgtacatctttaagcaacccttcatgaggcctgtgcagactactcaagaggaggacggctgttcatgccggttcccagaggaggaggaaggcggctgcgaactgcgcgtgaaattcagccgcagcgcagatgctccagcctaccagcaggggcagaaccagctctacaacgaactcaatcttggtcggagagaggagtacgacgtgctggacaagcggagaggacgggacccagaaatgggcgggaagccgcgcagaaagaatccccaagagggcctgtacaacgagctccaaaaggataagatggcagaagcctatagcgagattggtatgaaaggggaacgcagaagaggcaaaggccacgacggactgtaccagggactcagcaccgccaccaaggacacctatgacgctcttcacatgcaggccctgccgcctcgg

SEQ ID NO: 1099 - protein, 5 aa, synthetic construct
  REGION 1..5: note = source = /note="Description of Artificial Sequence: Synthetic peptide"
NYNLH

SEQ ID NO: 1100 - protein, 17 aa, synthetic construct
  REGION 1..17: note = source = /note="Description of Artificial Sequence: Synthetic peptide"
AIYPGNYDTSYNQKFKG

SEQ ID NO: 1101 - protein, 13 aa, synthetic construct
  REGION 1..13: note = source = /note="Description of Artificial Sequence: Synthetic peptide"
VDFGHSRYWYFDV

SEQ ID NO: 1102 - protein, 7 aa, synthetic construct
  REGION 1..7: note = source = /note="Description of Artificial Sequence: Synthetic peptide"
GYTFTNY

SEQ ID NO: 1103 - protein, 6 aa, synthetic construct
  REGION 1..6: note = source = /note="Description of Artificial Sequence: Synthetic peptide"
YPGNYD

SEQ ID NO: 1104 - protein, 13 aa, synthetic construct
  REGION 1..13: note = source = /note="Description of Artificial Sequence: Synthetic peptide"
VDFGHSRYWYFDV

SEQ ID NO: 1105 - protein, 8 aa, synthetic construct
  REGION 1..8: note = source = /note="Description of Artificial Sequence: Synthetic peptide"
GYTFTNYN

SEQ ID NO: 1106 - protein, 8 aa, synthetic construct
  REGION 1..8: note = source = /note="Description of Artificial Sequence: Synthetic peptide"
IYPGNYDT

SEQ ID NO: 1107 - protein, 15 aa, synthetic construct
  REGION 1..15: note = source = /note="Description of Artificial Sequence: Synthetic peptide"
ARVDFGHSRYWYFDV

SEQ ID NO: 1108 - protein, 10 aa, synthetic construct
  REGION 1..10: note = source = /note="Description of Artificial Sequence: Synthetic peptide"
GYTFTNYNLH

SEQ ID NO: 1109 - protein, 17 aa, synthetic construct
  REGION 1..17: note = source = /note="Description of Artificial Sequence: Synthetic peptide"
AIYPGNYDTSYNQKFKG

SEQ ID NO: 1110 - protein, 13 aa, synthetic construct
  REGION 1..13: note = source = /note="Description of Artificial Sequence: Synthetic peptide"
VDFGHSRYWYFDV

SEQ ID NO: 1111 - protein, 122 aa, synthetic construct
  REGION 1..122: note = source = /note="Description of Artificial Sequence: Synthetic polypeptide"
QVQLVQSGAEVKKPGSSVKVSCKASGYTFTNYNLHWVRQAPGQGLEWMGAIYPGNYDTSYNQKFKGRVTITADKSTSTAYMELSSLRSEDTAVYYCARVDFGHSRYWYFDVWGQGTTVTVSS

SEQ ID NO: 1112 - DNA, 366 bp, synthetic construct; identical to SEQ ID NO: 1079
  misc_feature 1..366: note = source = /note="Description of Artificial Sequence: Synthetic polynucleotide"
  source 1..366: mol_type = other DNA

SEQ ID NO: 1113 - protein, 10 aa, synthetic construct
  REGION 1..10: note = source = /note="Description of Artificial Sequence: Synthetic peptide"
RATSSVSSMN

SEQ ID NO: 1114 - protein, 7 aa, synthetic construct
  REGION 1..7: note = source = /note="Description of Artificial Sequence: Synthetic peptide"
ATSNLAS

SEQ ID NO: 1115 - protein, 9 aa, synthetic construct
  REGION 1..9: note = source = /note="Description of Artificial Sequence: Synthetic peptide"
QQWTFNPPT

SEQ ID NO: 1116 - protein, 6 aa, synthetic construct
  REGION 1..6: note = source = /note="Description of Artificial Sequence: Synthetic peptide"
TSSVSS

SEQ ID NO: 1117 - skipped

SEQ ID NO: 1118 - protein, 6 aa, synthetic construct
  REGION 1..6: note = source = /note="Description of Artificial Sequence: Synthetic peptide"
WTFNPP

SEQ ID NO: 1119 - protein, 5 aa, synthetic construct
  REGION 1..5: note = source = /note="Description of Artificial Sequence: Synthetic peptide"
SSVSS

SEQ ID NO: 1120 - skipped

SEQ ID NO: 1121 - protein, 9 aa, synthetic construct
  REGION 1..9: note = source = /note="Description of Artificial Sequence: Synthetic peptide"
QQWTFNPPT

SEQ ID NO: 1122 - protein, 10 aa, synthetic construct
  REGION 1..10: note = source = /note="Description of Artificial Sequence: Synthetic peptide"
RATSSVSSMN

SEQ ID NO: 1123 - protein, 7 aa, synthetic construct
  REGION 1..7: note = source = /note="Description of Artificial Sequence: Synthetic peptide"
ATSNLAS

SEQ ID NO: 1124 - protein, 9 aa, synthetic construct
  REGION 1..9: note = source = /note="Description of Artificial Sequence: Synthetic peptide"
QQWTFNPPT

SEQ ID NO: 1125 - protein, 106 aa, synthetic construct; identical to SEQ ID NO: 1062
  REGION 1..106: note = source = /note="Description of Artificial Sequence: Synthetic polypeptide"

SEQ ID NO: 1126 - DNA, 318 bp, synthetic construct; identical to SEQ ID NO: 1093
  misc_feature 1..318: note = source = /note="Description of Artificial Sequence: Synthetic polynucleotide"
  source 1..318: mol_type = other DNA

SEQ ID NO: 1127 - protein, 20 aa, synthetic construct
  REGION 1..20: note = source = /note="Description of Artificial Sequence: Synthetic peptide"
GGGGSGGGGSGGGGSGGGGS

SEQ ID NO: 1128 - protein, 248 aa, synthetic construct
  REGION 1..248: note = source = /note="Description of Artificial Sequence: Synthetic polypeptide"
QVQLVQSGAEVKKPGSSVKVSCKASGYTFTNYNLHWVRQAPGQGLEWMGAIYPGNYDTSYNQKFKGRVTITADKSTSTAYMELSSLRSEDTAVYYCARVDFGHSRYWYFDVWGQGTTVTVSSGGGGSGGGGSGGGGSGGGGSEIVLTQSPATLSLSPGERATLSCRATSSVSSMNWYQQKPGQAPRPLIHATSNLASGIPARFSGSGSGTDYTLTISSLEPEDAAVYYCQQWTFNPPTFGQGTKLEIK

SEQ ID NO: 1129 - DNA, 744 bp, synthetic construct
  misc_feature 1..744: note = source = /note="Description of Artificial Sequence: Synthetic polynucleotide"
  source 1..744: mol_type = other DNA
caagtccaactcgtccaatccggcgcagaagtcaagaaaccaggatcgtccgtgaaagtgtcctgcaaggcgtccgggtacaccttcactaattacaacctccactgggtcagacaggccccaggacagggcctggaatggatgggcgccatctaccctggaaactacgatacctcgtacaaccagaagttcaagggccgcgtgactattaccgccgacaagagcacctccaccgcctatatggaactgtcgtccctgcggtccgaggacactgccgtgtactactgtgcaagggtggacttcggtcactcccggtattggtacttcgacgtctggggacaggggaccactgtgaccgtgtcgtcgggaggcggtggaagcggcggtggcggaagcggaggcggcggatcagggggcggaggaagcgacattcagcttacccagtcaccgtccttcctgagcgcctccgtgggagatcgcgtgaccatcacatgccgcgccacttcctcggtgtcctccatgaactggtaccagcagaagcccggaaaggctcctaagcctctgatccatgcgacctccaacttggcttccggggtgccgtcacggttcagcggcagcggttcaggaactgagtacaccctgactattagctctctccaacccgaggacttcgccacctactactgccagcagtggaccttcaacccgcccacgtttgggcagggtaccaagctggagatcaag

SEQ ID NO: 1130 - protein, 492 aa, synthetic construct
  REGION 1..492: note = source = /note="Description of Artificial Sequence: Synthetic polypeptide"
MALPVTALLLPLALLLHAARPQVQLVQSGAEVKKPGSSVKVSCKASGYTFTNYNLHWVRQAPGQGLEWMGAIYPGNYDTSYNQKFKGRVTITADKSTSTAYMELSSLRSEDTAVYYCARVDFGHSRYWYFDVWGQGTTVTVSSGGGGSGGGGSGGGGSGGGGSDIQLTQSPSFLSASVGDRVTITCRATSSVSSMNWYQQKPGKAPKPLIHATSNLASGVPSRFSGSGSGTEYTLTISSLQPEDFATYYCQQWTFNPPTFGQGTKLEIKTTTPAPRPPTPAPTIASQPLSLRPEACRPAAGGAVHTRGLDFACDIYIWAPLAGTCGVLLLSLVITLYCKRGRKKLLYIFKQPFMRPVQTTQEEDGCSCRFPEEEEGGCELRVKFSRSADAPAYQQGQNQLYNELNLGRREEYDVLDKRRGRDPEMGGKPRRKNPQEGLYNELQKDKMAEAYSEIGMKGERRRGKGHDGLYQGLSTATKDTYDALHMQALPPR

SEQ ID NO: 1131 - DNA, 1476 bp, synthetic construct
  misc_feature 1..1476: note = source = /note="Description of Artificial Sequence: Synthetic polynucleotide"
  source 1..1476: mol_type = other DNA
atggccctccctgtcaccgccctgctgcttccgctggctcttctgctccacgccgctcggccccaagtccaactcgtccaatccggcgcagaagtcaagaaaccaggatcgtccgtgaaagtgtcctgcaaggcgtccgggtacaccttcactaattacaacctccactgggtcagacaggccccaggacagggcctggaatggatgggcgccatctaccctggaaactacgatacctcgtacaaccagaagttcaagggccgcgtgactattaccgccgacaagagcacctccaccgcctatatggaactgtcgtccctgcggtccgaggacactgccgtgtactactgtgcaagggtggacttcggtcactcccggtattggtacttcgacgtctggggacaggggaccactgtgaccgtgtcgtcgggaggcggtggaagcggcggtggcggaagcggaggcggcggatcagggggcggaggaagcgacattcagcttacccagtcaccgtccttcctgagcgcctccgtgggagatcgcgtgaccatcacatgccgcgccacttcctcggtgtcctccatgaactggtaccagcagaagcccggaaaggctcctaagcctctgatccatgcgacctccaacttggcttccggggtgccgtcacggttcagcggcagcggttcaggaactgagtacaccctgactattagctctctccaacccgaggacttcgccacctactactgccagcagtggaccttcaacccgcccacgtttgggcagggtaccaagctggagatcaagaccactaccccagcaccgaggccacccaccccggctcctaccatcgcctcccagcctctgtccctgcgtccggaggcatgtagacccgcagctggtggggccgtgcatacccggggtcttgacttcgcctgcgatatctacatttgggcccctctggctggtacttgcggggtcctgctgctttcactcgtgatcactctttactgtaagcgcggtcggaagaagctgctgtacatctttaagcaacccttcatgaggcctgtgcagactactcaagaggaggacggctgttcatgccggttcccagaggaggaggaaggcggctgcgaactgcgcgtgaaattcagccgcagcgcagatgctccagcctaccagcaggggcagaaccagctctacaacgaactcaatcttggtcggagagaggagtacgacgtgctggacaagcggagaggacgggacccagaaatgggcgggaagccgcgcagaaagaatccccaagagggcctgtacaacgagctccaaaaggataagatggcagaagcctatagcgagattggtatgaaaggggaacgcagaagaggcaaaggccacgacggactgtaccagggactcagcaccgccaccaaggacacctatgacgctcttcacatgcaggccctgccgcctcgg

SEQ ID NO: 1132 - protein, 5 aa, synthetic construct
  REGION 1..5: note = source = /note="Description of Artificial Sequence: Synthetic peptide"
SYNMH

SEQ ID NO: 1133 - protein, 17 aa, synthetic construct
  REGION 1..17: note = source = /note="Description of Artificial Sequence: Synthetic peptide"
AIYPGNGDTSYNPKFKG

SEQ ID NO: 1134 - protein, 13 aa, synthetic construct
  REGION 1..13: note = source = /note="Description of Artificial Sequence: Synthetic peptide"
SYFYGSSSWYFDV

SEQ ID NO: 1135 - protein, 7 aa, synthetic construct
  REGION 1..7: note = source = /note="Description of Artificial Sequence: Synthetic peptide"
GYTFTSY

SEQ ID NO: 1136 - protein, 6 aa, synthetic construct
  REGION 1..6: note = source = /note="Description of Artificial Sequence: Synthetic peptide"
YPGNGD

SEQ ID NO: 1137 - protein, 13 aa, synthetic construct
  REGION 1..13: note = source = /note="Description of Artificial Sequence: Synthetic peptide"
SYFYGSSSWYFDV

SEQ ID NO: 1138 - protein, 8 aa, synthetic construct
  REGION 1..8: note = source = /note="Description of Artificial Sequence: Synthetic peptide"
GYTFTSYN

SEQ ID NO: 1139 - protein, 8 aa, synthetic construct
  REGION 1..8: note = source = /note="Description of Artificial Sequence: Synthetic peptide"
IYPGNGDT

SEQ ID NO: 1140 - protein, 15 aa, synthetic construct
  REGION 1..15: note = source = /note="Description of Artificial Sequence: Synthetic peptide"
ARSYFYGSSSWYFDV

SEQ ID NO: 1141 - protein, 10 aa, synthetic construct
  REGION 1..10: note = source = /note="Description of Artificial Sequence: Synthetic peptide"
GYTFTSYNMH

SEQ ID NO: 1142 - protein, 17 aa, synthetic construct
  REGION 1..17: note = source = /note="Description of Artificial Sequence: Synthetic peptide"
AIYPGNGDTSYNPKFKG

SEQ ID NO: 1143 - protein, 13 aa, synthetic construct
  REGION 1..13: note = source = /note="Description of Artificial Sequence: Synthetic peptide"
SYFYGSSSWYFDV

SEQ ID NO: 1144 - protein, 122 aa, synthetic construct; identical to SEQ ID NO: 883
  REGION 1..122: note = source = /note="Description of Artificial Sequence: Synthetic polypeptide"

SEQ ID NO: 1145 - DNA, 366 bp, synthetic construct
  misc_feature 1..366: note = source = /note="Description of Artificial Sequence: Synthetic polynucleotide"
  source 1..366: mol_type = other DNA
caagtccaactcgtccagtcaggagcagaagtcaagaaacctggagcttccgtgaaagtgtcgtgcaaggcctccggctacaccttcacctcttacaacatgcactgggtcagacaggcccctggtcaaggactggaatggatgggagcgatctacccgggcaacggagacacttcgtacaaccccaagttcaagggacgggtcactatgaccgccgataagagcacgcgcaccgcgtacatggaactgagcagcctgcgctccgaggacactgccgtgtattactgcgcgaggagctacttctacggatcatcgtcgtggtacttcgacgtctggggccagggcaccaccgtgaccgtgtcatcc

SEQ ID NO: 1146 - protein, 10 aa, synthetic construct
  REGION 1..10: note = source = /note="Description of Artificial Sequence: Synthetic peptide"
RASSSVSSMH

SEQ ID NO: 1147 - protein, 7 aa, synthetic construct
  REGION 1..7: note = source = /note="Description of Artificial Sequence: Synthetic peptide"
ATSNLAS

SEQ ID NO: 1148 - protein, 9 aa, synthetic construct
  REGION 1..9: note = source = /note="Description of Artificial Sequence: Synthetic peptide"
QQWIFNPPT

SEQ ID NO: 1149 - protein, 6 aa, synthetic construct
  REGION 1..6: note = source = /note="Description of Artificial Sequence: Synthetic peptide"
SSSVSS

SEQ ID NO: 1150 - skipped

SEQ ID NO: 1151 - protein, 6 aa, synthetic construct
  REGION 1..6: note = source = /note="Description of Artificial Sequence: Synthetic peptide"
WIFNPP

SEQ ID NO: 1152 - protein, 5 aa, synthetic construct
  REGION 1..5: note = source = /note="Description of Artificial Sequence: Synthetic peptide"
SSVSS

SEQ ID NO: 1153 - skipped

SEQ ID NO: 1154 - protein, 9 aa, synthetic construct
  REGION 1..9: note = source = /note="Description of Artificial Sequence: Synthetic peptide"
QQWIFNPPT

SEQ ID NO: 1155 - protein, 10 aa, synthetic construct
  REGION 1..10: note = source = /note="Description of Artificial Sequence: Synthetic peptide"
RASSSVSSMH

SEQ ID NO: 1156 - protein, 7 aa, synthetic construct
  REGION 1..7: note = source = /note="Description of Artificial Sequence: Synthetic peptide"
ATSNLAS

SEQ ID NO: 1157 - protein, 9 aa, synthetic construct
  REGION 1..9: note = source = /note="Description of Artificial Sequence: Synthetic peptide"
QQWIFNPPT

SEQ ID NO: 1158 - protein, 106 aa, synthetic construct
  REGION 1..106: note = source = /note="Description of Artificial Sequence: Synthetic polypeptide"
DIQLTQSPSFLSASVGDRVTITCRASSSVSSMHWYQQKPGKAPKPLIFATSNLASGVPSRFSGSGSGTEYTLTISSLQPEDFATYYCQQWIFNPPTFGGGTKVEIK

SEQ ID NO: 1159 - DNA, 318 bp, synthetic construct
  misc_feature 1..318: note = source = /note="Description of Artificial Sequence: Synthetic polynucleotide"
  source 1..318: mol_type = other DNA
gatattcagctgacccagagcccgtcattcctgtccgcctccgtgggagacagagtgaccatcacttgtcgggccagctcctcggtgtcctccatgcattggtatcagcagaagcctgggaaggctcccaagcccctcatcttcgccacatcaaatcttgcctccggggtgccaagccggttctccgggagcggctccggtactgagtacactctgaccatttcctccttgcaacccgaggactttgccacctactactgccagcagtggatctttaacccgccgaccttcggaggaggaaccaaagtggagatcaag

SEQ ID NO: 1160 - protein, 20 aa, synthetic construct
  REGION 1..20: note = source = /note="Description of Artificial Sequence: Synthetic peptide"
GGGGSGGGGSGGGGSGGGGS

SEQ ID NO: 1161 - protein, 248 aa, synthetic construct
  REGION 1..248: note = source = /note="Description of Artificial Sequence: Synthetic polypeptide"
QVQLVQSGAEVKKPGASVKVSCKASGYTFTSYNMHWVRQAPGQGLEWMGAIYPGNGDTSYNPKFKGRVTMTADKSTRTAYMELSSLRSEDTAVYYCARSYFYGSSSWYFDVWGQGTTVTVSSGGGGSGGGGSGGGGSGGGGSDIQLTQSPSFLSASVGDRVTITCRASSSVSSMHWYQQKPGKAPKPLIFATSNLASGVPSRFSGSGSGTEYTLTISSLQPEDFATYYCQQWIFNPPTFGGGTKVEIK

SEQ ID NO: 1162 - DNA, 744 bp, synthetic construct
  misc_feature 1..744: note = source = /note="Description of Artificial Sequence: Synthetic polynucleotide"
  source 1..744: mol_type = other DNA
caagtccaactcgtccagtcaggagcagaagtcaagaaacctggagcttccgtgaaagtgtcgtgcaaggcctccggctacaccttcacctcttacaacatgcactgggtcagacaggcccctggtcaaggactggaatggatgggagcgatctacccgggcaacggagacacttcgtacaaccccaagttcaagggacgggtcactatgaccgccgataagagcacgcgcaccgcgtacatggaactgagcagcctgcgctccgaggacactgccgtgtattactgcgcgaggagctacttctacggatcatcgtcgtggtacttcgacgtctggggccagggcaccaccgtgaccgtgtcatccggtggcggaggatcggggggcggaggaagcggcggggggggctccggcggtggaggctcggatattcagctgacccagagcccgtcattcctgtccgcctccgtgggagacagagtgaccatcacttgtcgggccagctcctcggtgtcctccatgcattggtatcagcagaagcctgggaaggctcccaagcccctcatcttcgccacatcaaatcttgcctccggggtgccaagccggttctccgggagcggctccggtactgagtacactctgaccatttcctccttgcaacccgaggactttgccacctactactgccagcagtggatctttaacccgccgaccttcggaggaggaaccaaagtggagatcaag

SEQ ID NO: 1163 - protein, 492 aa, synthetic construct
  REGION 1..492: note = source = /note="Description of Artificial Sequence: Synthetic polypeptide"
MALPVTALLLPLALLLHAARPQVQLVQSGAEVKKPGASVKVSCKASGYTFTSYNMHWVRQAPGQGLEWMGAIYPGNGDTSYNPKFKGRVTMTADKSTRTAYMELSSLRSEDTAVYYCARSYFYGSSSWYFDVWGQGTTVTVSSGGGGSGGGGSGGGGSGGGGSDIQLTQSPSFLSASVGDRVTITCRASSSVSSMHWYQQKPGKAPKPLIFATSNLASGVPSRFSGSGSGTEYTLTISSLQPEDFATYYCQQWIFNPPTFGGGTKVEIKTTTPAPRPPTPAPTIASQPLSLRPEACRPAAGGAVHTRGLDFACDIYIWAPLAGTCGVLLLSLVITLYCKRGRKKLLYIFKQPFMRPVQTTQEEDGCSCRFPEEEEGGCELRVKFSRSADAPAYQQGQNQLYNELNLGRREEYDVLDKRRGRDPEMGGKPRRKNPQEGLYNELQKDKMAEAYSEIGMKGERRRGKGHDGLYQGLSTATKDTYDALHMQALPPR

SEQ ID NO: 1164 - DNA, 1476 bp, synthetic construct
  misc_feature 1..1476: note = source = /note="Description of Artificial Sequence: Synthetic polynucleotide"
  source 1..1476: mol_type = other DNA
atggccctccctgtcaccgccctgctgcttccgctggctcttctgctccacgccgctcggccccaagtccaactcgtccagtcaggagcagaagtcaagaaacctggagcttccgtgaaagtgtcgtgcaaggcctccggctacaccttcacctcttacaacatgcactgggtcagacaggcccctggtcaaggactggaatggatgggagcgatctacccgggcaacggagacacttcgtacaaccccaagttcaagggacgggtcactatgaccgccgataagagcacgcgcaccgcgtacatggaactgagcagcctgcgctccgaggacactgccgtgtattactgcgcgaggagctacttctacggatcatcgtcgtggtacttcgacgtctggggccagggcaccaccgtgaccgtgtcatccggtggcggaggatcggggggcggaggaagcggcggggggggctccggcggtggaggctcggatattcagctgacccagagcccgtcattcctgtccgcctccgtgggagacagagtgaccatcacttgtcgggccagctcctcggtgtcctccatgcattggtatcagcagaagcctgggaaggctcccaagcccctcatcttcgccacatcaaatcttgcctccggggtgccaagccggttctccgggagcggctccggtactgagtacactctgaccatttcctccttgcaacccgaggactttgccacctactactgccagcagtggatctttaacccgccgaccttcggaggaggaaccaaagtggagatcaagaccactaccccagcaccgaggccacccaccccggctcctaccatcgcctcccagcctctgtccctgcgtccggaggcatgtagacccgcagctggtggggccgtgcatacccggggtcttgacttcgcctgcgatatctacatttgggcccctctggctggtacttgcggggtcctgctgctttcactcgtgatcactctttactgtaagcgcggtcggaagaagctgctgtacatctttaagcaacccttcatgaggcctgtgcagactactcaagaggaggacggctgttcatgccggttcccagaggaggaggaaggcggctgcgaactgcgcgtgaaattcagccgcagcgcagatgctccagcctaccagcaggggcagaaccagctctacaacgaactcaatcttggtcggagagaggagtacgacgtgctggacaagcggagaggacgggacccagaaatgggcgggaagccgcgcagaaagaatccccaagagggcctgtacaacgagctccaaaaggataagatggcagaagcctatagcgagattggtatgaaaggggaacgcagaagaggcaaaggccacgacggactgtaccagggactcagcaccgccaccaaggacacctatgacgctcttcacatgcaggccctgccgcctcgg

SEQ ID NO: 1165 - protein, 5 aa, synthetic construct
  REGION 1..5: note = source = /note="Description of Artificial Sequence: Synthetic peptide"
SYNMH

SEQ ID NO: 1166 - protein, 17 aa, synthetic construct
  REGION 1..17: note = source = /note="Description of Artificial Sequence: Synthetic peptide"
AIYPGNGDTSYNPKFKG

SEQ ID NO: 1167 - protein, 13 aa, synthetic construct
  REGION 1..13: note = source = /note="Description of Artificial Sequence: Synthetic peptide"
SYFYGSSSWYFDV

SEQ ID NO: 1168 - protein, 7 aa, synthetic construct
  REGION 1..7: note = source = /note="Description of Artificial Sequence: Synthetic peptide"
GYTFTSY

SEQ ID NO: 1169 - protein, 6 aa, synthetic construct
  REGION 1..6: note = source = /note="Description of Artificial Sequence: Synthetic peptide"
YPGNGD

SEQ ID NO: 1170 - protein, 13 aa, synthetic construct
  REGION 1..13: note = source = /note="Description of Artificial Sequence: Synthetic peptide"
SYFYGSSSWYFDV

SEQ ID NO: 1171 - protein, 8 aa, synthetic construct
  REGION 1..8: note = source = /note="Description of Artificial Sequence: Synthetic peptide"
GYTFTSYN

SEQ ID NO: 1172 - protein, 8 aa, synthetic construct
  REGION 1..8: note = source = /note="Description of Artificial Sequence: Synthetic peptide"
IYPGNGDT

SEQ ID NO: 1173 - protein, 15 aa, synthetic construct
  REGION 1..15: note = source = /note="Description of Artificial Sequence: Synthetic peptide"
ARSYFYGSSSWYFDV

SEQ ID NO: 1174 - protein, 10 aa, synthetic construct
  REGION 1..10: note = source = /note="Description of Artificial Sequence: Synthetic peptide"
GYTFTSYNMH

SEQ ID NO: 1175 - protein, 17 aa, synthetic construct
  REGION 1..17: note = source = /note="Description of Artificial Sequence: Synthetic peptide"
AIYPGNGDTSYNPKFKG

SEQ ID NO: 1176 - protein, 13 aa, synthetic construct
  REGION 1..13: note = source = /note="Description of Artificial Sequence: Synthetic peptide"
SYFYGSSSWYFDV

SEQ ID NO: 1177 - protein, 122 aa, synthetic construct
  REGION 1..122: note = source = /note="Description of Artificial Sequence: Synthetic polypeptide"
QVQLVQSGAEVKKPGSSVKVSCKASGYTFTSYNMHWVRQAPGQGLEWMGAIYPGNGDTSYNPKFKGRVTITADKSTRTAYMELSSLRSEDTAVYYCARSYFYGSSSWYFDVWGQGTTVTVSS

SEQ ID NO: 1178 - DNA, 366 bp, synthetic construct
  misc_feature 1..366: note = source = /note="Description of Artificial Sequence: Synthetic polynucleotide"
  source 1..366: mol_type = other DNA
caagtgcaactcgtccagtccggtgcagaagtcaagaagcctggttcatcggtgaaagtgtcctgcaaagcgtcgggctacaccttcacctcgtacaacatgcactgggtccgccaggcccccggacaaggactggaatggatgggtgctatctaccccggaaacggagataccagctacaaccccaagttcaagggacgcgtgaccattactgccgacaagtccacaagaaccgcctacatggaactgtccagcctgagatccgaggacactgcggtgtactactgtgcgaggtcctacttctacgggtcctcctcttggtacttcgacgtctggggacagggcactactgtgaccgtgtccagc

SEQ ID NO: 1179 - protein, 10 aa, synthetic construct
  REGION 1..10: note = source = /note="Description of Artificial Sequence: Synthetic peptide"
RASSSVSSMH

SEQ ID NO: 1180 - protein, 7 aa, synthetic construct
  REGION 1..7: note = source = /note="Description of Artificial Sequence: Synthetic peptide"
ATSNLAS

SEQ ID NO: 1181 - protein, 9 aa, synthetic construct
  REGION 1..9: note = source = /note="Description of Artificial Sequence: Synthetic peptide"
QQWIFNPPT

SEQ ID NO: 1182 - protein, 6 aa, synthetic construct
  REGION 1..6: note = source = /note="Description of Artificial Sequence: Synthetic peptide"
SSSVSS

SEQ ID NO: 1183 - skipped

SEQ ID NO: 1184 - protein, 6 aa, synthetic construct
  REGION 1..6: note = source = /note="Description of Artificial Sequence: Synthetic peptide"
WIFNPP

SEQ ID NO: 1185 - protein, 5 aa, synthetic construct
  REGION 1..5: note = source = /note="Description of Artificial Sequence: Synthetic peptide"
SSVSS

SEQ ID NO: 1186 - skipped

SEQ ID NO: 1187 - protein, 9 aa, synthetic construct
  REGION 1..9: note = source = /note="Description of Artificial Sequence: Synthetic peptide"
QQWIFNPPT

SEQ ID NO: 1188 - protein, 10 aa, synthetic construct
  REGION 1..10: note = source = /note="Description of Artificial Sequence: Synthetic peptide"
RASSSVSSMH

SEQ ID NO: 1189 - protein, 7 aa, synthetic construct
  REGION 1..7: note = source = /note="Description of Artificial Sequence: Synthetic peptide"
ATSNLAS

SEQ ID NO: 1190 - protein, 9 aa, synthetic construct
  REGION 1..9: note = source = /note="Description of Artificial Sequence: Synthetic peptide"
QQWIFNPPT

SEQ ID NO: 1191 - protein, 106 aa, synthetic construct; identical to SEQ ID NO: 897
  REGION 1..106: note = source = /note="Description of Artificial Sequence: Synthetic polypeptide"

SEQ ID NO: 1192 - DNA, 318 bp, synthetic construct
  misc_feature 1..318: note = source = /note="Description of Artificial Sequence: Synthetic polynucleotide"
  source 1..318: mol_type = other DNA
gagatcgtgctgacgcagtcgccggccaccctgagcctttcaccgggagaacgcgccactctgtcatgccgggccagcagctccgtgtcctccatgcattggtaccagcagaagccggggcaggccccgcggcctctcatcttcgccacctccaatctggcctccggcatccctgctcggtttagcggaagcggcagcggaactgactataccttgaccatctcctcgctggaaccagaggatgcagccgtgtactattgccagcagtggatcttcaacccgccaaccttcggcggcggcaccaaggtcgagattaag

SEQ ID NO: 1193 - protein, 20 aa, synthetic construct
  REGION 1..20: note = source = /note="Description of Artificial Sequence: Synthetic peptide"
GGGGSGGGGSGGGGSGGGGS

SEQ ID NO: 1194 - protein, 248 aa, synthetic construct
  REGION 1..248: note = source = /note="Description of Artificial Sequence: Synthetic polypeptide"
QVQLVQSGAEVKKPGSSVKVSCKASGYTFTSYNMHWVRQAPGQGLEWMGAIYPGNGDTSYNPKFKGRVTITADKSTRTAYMELSSLRSEDTAVYYCARSYFYGSSSWYFDVWGQGTTVTVSSGGGGSGGGGSGGGGSGGGGSEIVLTQSPATLSLSPGERATLSCRASSSVSSMHWYQQKPGQAPRPLIFATSNLASGIPARFSGSGSGTDYTLTISSLEPEDAAVYYCQQWIFNPPTFGGGTKVEIK

SEQ ID NO: 1195 - DNA, 744 bp, synthetic construct
  misc_feature 1..744: note = source = /note="Description of Artificial Sequence: Synthetic polynucleotide"
  source 1..744: mol_type = other DNA
caagtgcaactcgtccagtccggtgcagaagtcaagaagcctggttcatcggtgaaagtgtcctgcaaagcgtcgggctacaccttcacctcgtacaacatgcactgggtccgccaggcccccggacaaggactggaatggatgggtgctatctaccccggaaacggagataccagctacaaccccaagttcaagggacgcgtgaccattactgccgacaagtccacaagaaccgcctacatggaactgtccagcctgagatccgaggacactgcggtgtactactgtgcgaggtcctacttctacgggtcctcctcttggtacttcgacgtctggggacagggcactactgtgaccgtgtccagcgggggaggcggtagcggggggggtggatcgggcggcggcggatcaggaggaggagggtccgagatcgtgctgacgcagtcgccggccaccctgagcctttcaccgggagaacgcgccactctgtcatgccgggccagcagctccgtgtcctccatgcattggtaccagcagaagccggggcaggccccgcggcctctcatcttcgccacctccaatctggcctccggcatccctgctcggtttagcggaagcggcagcggaactgactataccttgaccatctcctcgctggaaccagaggatgcagccgtgtactattgccagcagtggatcttcaacccgccaaccttcggcggcggcaccaaggtcgagattaag

SEQ ID NO: 1196 - protein, 492 aa, synthetic construct
  REGION 1..492: note = source = /note="Description of Artificial Sequence: Synthetic polypeptide"
MALPVTALLLPLALLLHAARPQVQLVQSGAEVKKPGSSVKVSCKASGYTFTSYNMHWVRQAPGQGLEWMGAIYPGNGDTSYNPKFKGRVTITADKSTRTAYMELSSLRSEDTAVYYCARSYFYGSSSWYFDVWGQGTTVTVSSGGGGSGGGGSGGGGSGGGGSEIVLTQSPATLSLSPGERATLSCRASSSVSSMHWYQQKPGQAPRPLIFATSNLASGIPARFSGSGSGTDYTLTISSLEPEDAAVYYCQQWIFNPPTFGGGTKVEIKTTTPAPRPPTPAPTIASQPLSLRPEACRPAAGGAVHTRGLDFACDIYIWAPLAGTCGVLLLSLVITLYCKRGRKKLLYIFKQPFMRPVQTTQEEDGCSCRFPEEEEGGCELRVKFSRSADAPAYQQGQNQLYNELNLGRREEYDVLDKRRGRDPEMGGKPRRKNPQEGLYNELQKDKMAEAYSEIGMKGERRRGKGHDGLYQGLSTATKDTYDALHMQALPPR

SEQ ID NO: 1197 - DNA, 1476 bp, synthetic construct
  misc_feature 1..1476: note = source = /note="Description of Artificial Sequence: Synthetic polynucleotide"
  source 1..1476: mol_type = other DNA
atggccctccctgtcaccgccctgctgcttccgctggctcttctgctccacgccgctcggccccaagtgcaactcgtccagtccggtgcagaagtcaagaagcctggttcatcggtgaaagtgtcctgcaaagcgtcgggctacaccttcacctcgtacaacatgcactgggtccgccaggcccccggacaaggactggaatggatgggtgctatctaccccggaaacggagataccagctacaaccccaagttcaagggacgcgtgaccattactgccgacaagtccacaagaaccgcctacatggaactgtccagcctgagatccgaggacactgcggtgtactactgtgcgaggtcctacttctacgggtcctcctcttggtacttcgacgtctggggacagggcactactgtgaccgtgtccagcgggggaggcggtagcggggggggtggatcgggcggcggcggatcaggaggaggagggtccgagatcgtgctgacgcagtcgccggccaccctgagcctttcaccgggagaacgcgccactctgtcatgccgggccagcagctccgtgtcctccatgcattggtaccagcagaagccggggcaggccccgcggcctctcatcttcgccacctccaatctggcctccggcatccctgctcggtttagcggaagcggcagcggaactgactataccttgaccatctcctcgctggaaccagaggatgcagccgtgtactattgccagcagtggatcttcaacccgccaaccttcggcggcggcaccaaggtcgagattaagaccactaccccagcaccgaggccacccaccccggctcctaccatcgcctcccagcctctgtccctgcgtccggaggcatgtagacccgcagctggtggggccgtgcatacccggggtcttgacttcgcctgcgatatctacatttgggcccctctggctggtacttgcggggtcctgctgctttcactcgtgatcactctttactgtaagcgcggtcggaagaagctgctgtacatctttaagcaacccttcatgaggcctgtgcagactactcaagaggaggacggctgttcatgccggttcccagaggaggaggaaggcggctgcgaactgcgcgtgaaattcagccgcagcgcagatgctccagcctaccagcaggggcagaaccagctctacaacgaactcaatcttggtcggagagaggagtacgacgtgctggacaagcggagaggacgggacccagaaatgggcgggaagccgcgcagaaagaatccccaagagggcctgtacaacgagctccaaaaggataagatggcagaagcctatagcgagattggtatgaaaggggaacgcagaagaggcaaaggccacgacggactgtaccagggactcagcaccgccaccaaggacacctatgacgctcttcacatgcaggccctgccgcctcgg

SEQ ID NO: 1198 - protein, 5 aa, synthetic construct
  REGION 1..5: note = source = /note="Description of Artificial Sequence: Synthetic peptide"
SYNMH

SEQ ID NO: 1199 - protein, 17 aa, synthetic construct
  REGION 1..17: note = source = /note="Description of Artificial Sequence: Synthetic peptide"
AIYPGNGDTSYNPKFKG

SEQ ID NO: 1200 - protein, 13 aa, synthetic construct
  REGION 1..13: note = source = /note="Description of Artificial Sequence: Synthetic peptide"
SYFYGSSSWYFDV

SEQ ID NO: 1201 - protein, 7 aa, synthetic construct
  REGION 1..7: note = source = /note="Description of Artificial Sequence: Synthetic peptide"
GYTFTSY

SEQ ID NO: 1202 - protein, 6 aa, synthetic construct
  REGION 1..6: note = source = /note="Description of Artificial Sequence: Synthetic peptide"
YPGNGD

SEQ ID NO: 1203 - protein, 13 aa, synthetic construct
  REGION 1..13: note = source = /note="Description of Artificial Sequence: Synthetic peptide"
SYFYGSSSWYFDV

SEQ ID NO: 1204 - protein, 8 aa, synthetic construct
  REGION 1..8: note = source = /note="Description of Artificial Sequence: Synthetic peptide"
GYTFTSYN

SEQ ID NO: 1205 - protein, 8 aa, synthetic construct
  REGION 1..8: note = source = /note="Description of Artificial Sequence: Synthetic peptide"
IYPGNGDT

SEQ ID NO: 1206 - protein, 15 aa, synthetic construct
  REGION 1..15: note = source = /note="Description of Artificial Sequence: Synthetic peptide"
ARSYFYGSSSWYFDV

SEQ ID NO: 1207 - protein, 10 aa, synthetic construct
  REGION 1..10: note = source = /note="Description of Artificial Sequence: Synthetic peptide"
GYTFTSYNMH

SEQ ID NO: 1208 - protein, 17 aa, synthetic construct
  REGION 1..17: note = source = /note="Description of Artificial Sequence: Synthetic peptide"
AIYPGNGDTSYNPKFKG

SEQ ID NO: 1209 - protein, 13 aa, synthetic construct
  REGION 1..13: note = source = /note="Description of Artificial Sequence: Synthetic peptide"
SYFYGSSSWYFDV

SEQ ID NO: 1210 - protein, 122 aa, synthetic construct; identical to SEQ ID NO: 1177
  REGION 1..122: note = source = /note="Description of Artificial Sequence: Synthetic polypeptide"

SEQ ID NO: 1211 - DNA, 366 bp, synthetic construct
  misc_feature 1..366: note = source = /note="Description of Artificial Sequence: Synthetic polynucleotide"
  source 1..366: mol_type = other DNA
caagtgcaactcgtccagtccggtgcagaagtcaagaagccaggttcctcggtgaaagtgtcctgcaaagcctcgggttacaccttcacctcgtacaatatgcactgggtccgccaagctccgggacaaggcctggaatggatgggagcgatctaccccggaaacggcgacacgtcctacaacccgaagttcaagggaagagtgaccatcaccgccgacaagtccacccgcaccgcgtacatggagcttagcagcctgcggagcgaggacactgccgtgtattactgcgcccggtcctacttctatggatcatcctcgtggtacttcgatgtctggggccaggggaccaccgtgaccgtgtccagc

SEQ ID NO: 1212 - protein, 10 aa, synthetic construct
  REGION 1..10: note = source = /note="Description of Artificial Sequence: Synthetic peptide"
RASSSVSSMH

SEQ ID NO: 1213 - protein, 7 aa, synthetic construct
  REGION 1..7: note = source = /note="Description of Artificial Sequence: Synthetic peptide"
ATSNLAS

SEQ ID NO: 1214 - protein, 9 aa, synthetic construct
  REGION 1..9: note = source = /note="Description of Artificial Sequence: Synthetic peptide"
QQWIFNPPT

SEQ ID NO: 1215 - protein, 6 aa, synthetic construct
  REGION 1..6: note = source = /note="Description of Artificial Sequence: Synthetic peptide"
SSSVSS

SEQ ID NO: 1216 - skipped

SEQ ID NO: 1217 - protein, 6 aa, synthetic construct
  REGION 1..6: note = source = /note="Description of Artificial Sequence: Synthetic peptide"
WIFNPP

SEQ ID NO: 1218 - protein, 5 aa, synthetic construct
  REGION 1..5: note = source = /note="Description of Artificial Sequence: Synthetic peptide"
SSVSS

SEQ ID NO: 1219 - skipped

SEQ ID NO: 1220 - protein, 9 aa, synthetic construct
  REGION 1..9: note = source = /note="Description of Artificial Sequence: Synthetic peptide"
QQWIFNPPT

SEQ ID NO: 1221 - protein, 10 aa, synthetic construct
  REGION 1..10: note = source = /note="Description of Artificial Sequence: Synthetic peptide"
RASSSVSSMH

SEQ ID NO: 1222 - protein, 7 aa, synthetic construct
  REGION 1..7: note = source = /note="Description of Artificial Sequence: Synthetic peptide"
ATSNLAS

SEQ ID NO: 1223 - protein, 9 aa, synthetic construct
  REGION 1..9: note = source = /note="Description of Artificial Sequence: Synthetic peptide"
QQWIFNPPT

SEQ ID NO: 1224 - protein, 106 aa, synthetic construct; identical to SEQ ID NO: 1158
  REGION 1..106: note = source = /note="Description of Artificial Sequence: Synthetic polypeptide"

SEQ ID NO: 1225 - DNA, 318 bp, synthetic construct
  misc_feature 1..318: note = source = /note="Description of Artificial Sequence: Synthetic polynucleotide"
  source 1..318: mol_type = other DNA
gatatccagctgacccagagcccttccttcctgtccgcttccgtgggagacagagtcactattacttgtcgggcctcctcatccgtgtcatccatgcactggtaccagcagaagccgggaaaggccccaaagcccttgatctttgccacttccaacctggcatccggcgtgccctcgaggttctccgggagcggttcagggaccgagtacactctgaccattagcagcctccagcctgaggactttgccacctactactgccagcagtggattttcaacccgcctacattcggagggggcactaaggtcgaaatcaag

SEQ ID NO: 1226 - protein, 20 aa, synthetic construct
  REGION 1..20: note = source = /note="Description of Artificial Sequence: Synthetic peptide"
GGGGSGGGGSGGGGSGGGGS

SEQ ID NO: 1227 - protein, 248 aa, synthetic construct
  REGION 1..248: note = source = /note="Description of Artificial Sequence: Synthetic polypeptide"
QVQLVQSGAEVKKPGSSVKVSCKASGYTFTSYNMHWVRQAPGQGLEWMGAIYPGNGDTSYNPKFKGRVTITADKSTRTAYMELSSLRSEDTAVYYCARSYFYGSSSWYFDVWGQGTTVTVSSGGGGSGGGGSGGGGSGGGGSDIQLTQSPSFLSASVGDRVTITCRASSSVSSMHWYQQKPGKAPKPLIFATSNLASGVPSRFSGSGSGTEYTLTISSLQPEDFATYYCQQWIFNPPTFGGGTKVEIK

SEQ ID NO: 1228 - DNA, 744 bp, synthetic construct
  misc_feature 1..744: note = source = /note="Description of Artificial Sequence: Synthetic polynucleotide"
  source 1..744: mol_type = other DNA
caagtgcaactcgtccagtccggtgcagaagtcaagaagccaggttcctcggtgaaagtgtcctgcaaagcctcgggttacaccttcacctcgtacaatatgcactgggtccgccaagctccgggacaaggcctggaatggatgggagcgatctaccccggaaacggcgacacgtcctacaacccgaagttcaagggaagagtgaccatcaccgccgacaagtccacccgcaccgcgtacatggagcttagcagcctgcggagcgaggacactgccgtgtattactgcgcccggtcctacttctatggatcatcctcgtggtacttcgatgtctggggccaggggaccaccgtgaccgtgtccagcggtggcggaggcagcggcggaggagggtctggaggaggcggctcggggggagggggctcggatatccagctgacccagagcccttccttcctgtccgcttccgtgggagacagagtcactattacttgtcgggcctcctcatccgtgtcatccatgcactggtaccagcagaagccgggaaaggccccaaagcccttgatctttgccacttccaacctggcatccggcgtgccctcgaggttctccgggagcggttcagggaccgagtacactctgaccattagcagcctccagcctgaggactttgccacctactactgccagcagtggattttcaacccgcctacattcggagggggcactaaggtcgaaatcaag

SEQ ID NO: 1229 - protein, 492 aa, synthetic construct
  REGION 1..492: note = source = /note="Description of Artificial Sequence: Synthetic polypeptide"
MALPVTALLLPLALLLHAARPQVQLVQSGAEVKKPGSSVKVSCKASGYTFTSYNMHWVRQAPGQGLEWMGAIYPGNGDTSYNPKFKGRVTITADKSTRTAYMELSSLRSEDTAVYYCARSYFYGSSSWYFDVWGQGTTVTVSSGGGGSGGGGSGGGGSGGGGSDIQLTQSPSFLSASVGDRVTITCRASSSVSSMHWYQQKPGKAPKPLIFATSNLASGVPSRFSGSGSGTEYTLTISSLQPEDFATYYCQQWIFNPPTFGGGTKVEIKTTTPAPRPPTPAPTIASQPLSLRPEACRPAAGGAVHTRGLDFACDIYIWAPLAGTCGVLLLSLVITLYCKRGRKKLLYIFKQPFMRPVQTTQEEDGCSCRFPEEEEGGCELRVKFSRSADAPAYQQGQNQLYNELNLGRREEYDVLDKRRGRDPEMGGKPRRKNPQEGLYNELQKDKMAEAYSEIGMKGERRRGKGHDGLYQGLSTATKDTYDALHMQALPPR

SEQ ID NO: 1230 - DNA, 1476 bp, synthetic construct
  misc_feature 1..1476: note = source = /note="Description of Artificial Sequence: Synthetic polynucleotide"
  source 1..1476: mol_type = other DNA
atggccctccctgtcaccgccctgctgcttccgctggctcttctgctccacgccgctcggccccaagtgcaactcgtccagtccggtgcagaagtcaagaagccaggttcctcggtgaaagtgtcctgcaaagcctcgggttacaccttcacctcgtacaatatgcactgggtccgccaagctccgggacaaggcctggaatggatgggagcgatctaccccggaaacggcgacacgtcctacaacccgaagttcaagggaagagtgaccatcaccgccgacaagtccacccgcaccgcgtacatggagcttagcagcctgcggagcgaggacactgccgtgtattactgcgcccggtcctacttctatggatcatcctcgtggtacttcgatgtctggggccaggggaccaccgtgaccgtgtccagcggtggcggaggcagcggcggaggagggtctggaggaggcggctcggggggagggggctcggatatccagctgacccagagcccttccttcctgtccgcttccgtgggagacagagtcactattacttgtcgggcctcctcatccgtgtcatccatgcactggtaccagcagaagccgggaaaggccccaaagcccttgatctttgccacttccaacctggcatccggcgtgccctcgaggttctccgggagcggttcagggaccgagtacactctgaccattagcagcctccagcctgaggactttgccacctactactgccagcagtggattttcaacccgcctacattcggagggggcactaaggtcgaaatcaagaccactaccccagcaccgaggccacccaccccggctcctaccatcgcctcccagcctctgtccctgcgtccggaggcatgtagacccgcagctggtggggccgtgcatacccggggtcttgacttcgcctgcgatatctacatttgggcccctctggctggtacttgcggggtcctgctgctttcactcgtgatcactctttactgtaagcgcggtcggaagaagctgctgtacatctttaagcaacccttcatgaggcctgtgcagactactcaagaggaggacggctgttcatgccggttcccagaggaggaggaaggcggctgcgaactgcgcgtgaaattcagccgcagcgcagatgctccagcctaccagcaggggcagaaccagctctacaacgaactcaatcttggtcggagagaggagtacgacgtgctggacaagcggagaggacgggacccagaaatgggcgggaagccgcgcagaaagaatccccaagagggcctgtacaacgagctccaaaaggataagatggcagaagcctatagcgagattggtatgaaaggggaacgcagaagaggcaaaggccacgacggactgtaccagggactcagcaccgccaccaaggacacctatgacgctcttcacatgcaggccctgccgcctcgg

SEQ ID NO: 1231 - protein, 5 aa, synthetic construct
  REGION 1..5: note = source = /note="Description of Artificial Sequence: Synthetic peptide"
RYNMH

SEQ ID NO: 1232 - protein, 17 aa, synthetic construct
  REGION 1..17: note = source = /note="Description of Artificial Sequence: Synthetic peptide"
AIYPGNGDTSYSQKFKG

SEQ ID NO: 1233 - protein, 13 aa, synthetic construct
  REGION 1..13: note = source = /note="Description of Artificial Sequence: Synthetic peptide"
SFFYGSSDWYFDV

SEQ ID NO: 1234 - protein, 7 aa, synthetic construct
  REGION 1..7: note = source = /note="Description of Artificial Sequence: Synthetic peptide"
GYTFTRY

SEQ ID NO: 1235 - protein, 6 aa, synthetic construct
  REGION 1..6: note = source = /note="Description of Artificial Sequence: Synthetic peptide"
YPGNGD

SEQ ID NO: 1236 - protein, 13 aa, synthetic construct
  REGION 1..13: note = source = /note="Description of Artificial Sequence: Synthetic peptide"
SFFYGSSDWYFDV

SEQ ID NO: 1237 - protein, 8 aa, synthetic construct
  REGION 1..8: note = source = /note="Description of Artificial Sequence: Synthetic peptide"
GYTFTRYN

SEQ ID NO: 1238 - protein, 8 aa, synthetic construct
  REGION 1..8: note = source = /note="Description of Artificial Sequence: Synthetic peptide"
IYPGNGDT

SEQ ID NO: 1239 - protein, 15 aa, synthetic construct
  REGION 1..15: note = source = /note="Description of Artificial Sequence: Synthetic peptide"
ARSFFYGSSDWYFDV

SEQ ID NO: 1240 - protein, 10 aa, synthetic construct
  REGION 1..10: note = source = /note="Description of Artificial Sequence: Synthetic peptide"
GYTFTRYNMH

SEQ ID NO: 1241 - protein, 17 aa, synthetic construct
  REGION 1..17: note = source = /note="Description of Artificial Sequence: Synthetic peptide"
AIYPGNGDTSYSQKFKG

SEQ ID NO: 1242 - protein, 13 aa, synthetic construct
  REGION 1..13: note = source = /note="Description of Artificial Sequence: Synthetic peptide"
SFFYGSSDWYFDV

SEQ ID NO: 1243 - protein, 122 aa, synthetic construct
  REGION 1..122: note = source = /note="Description of Artificial Sequence: Synthetic polypeptide"
QVQLVQSGAEVKKPGASVKVSCKASGYTFTRYNMHWVRQAPGQRLEWMGAIYPGNGDTSYSQKFKGRVTITADKSASTAYMELSSLRSEDTAVYYCARSFFYGSSDWYFDVWGQGTTVTVSS

SEQ ID NO: 1244 - DNA, 366 bp, synthetic construct
  misc_feature 1..366: note = source = /note="Description of Artificial Sequence: Synthetic polynucleotide"
  source 1..366: mol_type = other DNA
caagtccaactcgtccagtcaggagcagaagtcaagaaaccaggagcatccgtgaaagtgtcgtgcaaagcctctggctacaccttcacccggtacaacatgcactgggtcagacaggccccgggacagcggctcgagtggatgggtgccatctaccccggcaacggggacacctcctactcccaaaagttcaagggtcgcgtgaccatcacggcggataagtcggccagcactgcgtacatggaattgtcatccctgcgctccgaggataccgccgtgtattactgcgcgcggtccttcttctacggctcctccgattggtacttcgacgtctggggacagggaactaccgtgaccgtgtcctcc

SEQ ID NO: 1245 - protein, 10 aa, synthetic construct
  REGION 1..10: note = source = /note="Description of Artificial Sequence: Synthetic peptide"
RASSSVNNMH

SEQ ID NO: 1246 - protein, 7 aa, synthetic construct
  REGION 1..7: note = source = /note="Description of Artificial Sequence: Synthetic peptide"
ATSNLAS

SEQ ID NO: 1247 - protein, 9 aa, synthetic construct
  REGION 1..9: note = source = /note="Description of Artificial Sequence: Synthetic peptide"
QQWIFNPPT

SEQ ID NO: 1248 - protein, 6 aa, synthetic construct
  REGION 1..6: note = source = /note="Description of Artificial Sequence: Synthetic peptide"
SSSVNN

SEQ ID NO: 1249 - skipped

SEQ ID NO: 1250 - protein, 6 aa, synthetic construct
  REGION 1..6: note = source = /note="Description of Artificial Sequence: Synthetic peptide"
WIFNPP

SEQ ID NO: 1251 - protein, 5 aa, synthetic construct
  REGION 1..5: note = source = /note="Description of Artificial Sequence: Synthetic peptide"
SSVNN

SEQ ID NO: 1252 - skipped

SEQ ID NO: 1253 - protein, 9 aa, synthetic construct
  REGION 1..9: note = source = /note="Description of Artificial Sequence: Synthetic peptide"
QQWIFNPPT

SEQ ID NO: 1254 - protein, 10 aa, synthetic construct
  REGION 1..10: note = source = /note="Description of Artificial Sequence: Synthetic peptide"
RASSSVNNMH

SEQ ID NO: 1255 - protein, 7 aa, synthetic construct
  REGION 1..7: note = source = /note="Description of Artificial Sequence: Synthetic peptide"
ATSNLAS

SEQ ID NO: 1256 - protein, 9 aa, synthetic construct
  REGION 1..9: note = source = /note="Description of Artificial Sequence: Synthetic peptide"
QQWIFNPPT

SEQ ID NO: 1257 - protein, 106 aa, synthetic construct
  REGION 1..106: note = source = /note="Description of Artificial Sequence: Synthetic polypeptide"
EIVLTQSPDFQSVTPKEKVTITCRASSSVNNMHWYQQKPDQSPKPLIYATSNLASGVPSRFSGSGSGTDYTLTINSLEAEDAATYYCQQWIFNPPTFGQGTKLEIK

SEQ ID NO: 1258 - DNA, 318 bp, synthetic construct
  misc_feature 1..318: note = source = /note="Description of Artificial Sequence: Synthetic polynucleotide"
  source 1..318: mol_type = other DNA
gaaatcgtgctgactcagtcgccggacttccaaagcgtgaccccaaaggagaaggtcaccatcacctgtagagcctcatcgtccgtgaacaatatgcactggtaccagcagaagccggaccagtcccctaagcccctgatctacgccacttccaacctggcctccggcgtgccgtcgaggttcagcggctcgggcagcgggaccgactacaccctgaccatcaacagccttgaagctgaggacgccgctacctactactgccagcagtggattttcaaccctcccacatttggacagggcactaagctggagattaag

SEQ ID NO: 1259 - protein, 20 aa, synthetic construct
  REGION 1..20: note = source = /note="Description of Artificial Sequence: Synthetic peptide"
GGGGSGGGGSGGGGSGGGGS

SEQ ID NO: 1260 - protein, 248 aa, synthetic construct
  REGION 1..248: note = source = /note="Description of Artificial Sequence: Synthetic polypeptide"
QVQLVQSGAEVKKPGASVKVSCKASGYTFTRYNMHWVRQAPGQRLEWMGAIYPGNGDTSYSQKFKGRVTITADKSASTAYMELSSLRSEDTAVYYCARSFFYGSSDWYFDVWGQGTTVTVSSGGGGSGGGGSGGGGSGGGGSEIVLTQSPDFQSVTPKEKVTITCRASSSVNNMHWYQQKPDQSPKPLIYATSNLASGVPSRFSGSGSGTDYTLTINSLEAEDAATYYCQQWIFNPPTFGQGTKLEIK

SEQ ID NO: 1261 - DNA, 744 bp, synthetic construct
  misc_feature 1..744: note = source = /note="Description of Artificial Sequence: Synthetic polynucleotide"
  source 1..744: mol_type = other DNA
caagtccaactcgtccagtcaggagcagaagtcaagaaaccaggagcatccgtgaaagtgtcgtgcaaagcctctggctacaccttcacccggtacaacatgcactgggtcagacaggccccgggacagcggctcgagtggatgggtgccatctaccccggcaacggggacacctcctactcccaaaagttcaagggtcgcgtgaccatcacggcggataagtcggccagcactgcgtacatggaattgtcatccctgcgctccgaggataccgccgtgtattactgcgcgcggtccttcttctacggctcctccgattggtacttcgacgtctggggacagggaactaccgtgaccgtgtcctccgggggtggcgggagcggagggggcggaagcgggggtggaggatcaggaggcggaggctccgaaatcgtgctgactcagtcgccggacttccaaagcgtgaccccaaaggagaaggtcaccatcacctgtagagcctcatcgtccgtgaacaatatgcactggtaccagcagaagccggaccagtcccctaagcccctgatctacgccacttccaacctggcctccggcgtgccgtcgaggttcagcggctcgggcagcgggaccgactacaccctgaccatcaacagccttgaagctgaggacgccgctacctactactgccagcagtggattttcaaccctcccacatttggacagggcactaagctggagattaag

SEQ ID NO: 1262 - protein, 492 aa, synthetic construct
  REGION 1..492: note = source = /note="Description of Artificial Sequence: Synthetic polypeptide"
MALPVTALLLPLALLLHAARPQVQLVQSGAEVKKPGASVKVSCKASGYTFTRYNMHWVRQAPGQRLEWMGAIYPGNGDTSYSQKFKGRVTITADKSASTAYMELSSLRSEDTAVYYCARSFFYGSSDWYFDVWGQGTTVTVSSGGGGSGGGGSGGGGSGGGGSEIVLTQSPDFQSVTPKEKVTITCRASSSVNNMHWYQQKPDQSPKPLIYATSNLASGVPSRFSGSGSGTDYTLTINSLEAEDAATYYCQQWIFNPPTFGQGTKLEIKTTTPAPRPPTPAPTIASQPLSLRPEACRPAAGGAVHTRGLDFACDIYIWAPLAGTCGVLLLSLVITLYCKRGRKKLLYIFKQPFMRPVQTTQEEDGCSCRFPEEEEGGCELRVKFSRSADAPAYQQGQNQLYNELNLGRREEYDVLDKRRGRDPEMGGKPRRKNPQEGLYNELQKDKMAEAYSEIGMKGERRRGKGHDGLYQGLSTATKDTYDALHMQALPPR

SEQ ID NO: 1263 - DNA, 1476 bp, synthetic construct
  misc_feature 1..1476: note = source = /note="Description of Artificial Sequence: Synthetic polynucleotide"
  source 1..1476: mol_type = other DNA
atggccctccctgtcaccgccctgctgcttccgctggctcttctgctccacgccgctcggccccaagtccaactcgtccagtcaggagcagaagtcaagaaaccaggagcatccgtgaaagtgtcgtgcaaagcctctggctacaccttcacccggtacaacatgcactgggtcagacaggccccgggacagcggctcgagtggatgggtgccatctaccccggcaacggggacacctcctactcccaaaagttcaagggtcgcgtgaccatcacggcggataagtcggccagcactgcgtacatggaattgtcatccctgcgctccgaggataccgccgtgtattactgcgcgcggtccttcttctacggctcctccgattggtacttcgacgtctggggacagggaactaccgtgaccgtgtcctccgggggtggcgggagcggagggggcggaagcgggggtggaggatcaggaggcggaggctccgaaatcgtgctgactcagtcgccggacttccaaagcgtgaccccaaaggagaaggtcaccatcacctgtagagcctcatcgtccgtgaacaatatgcactggtaccagcagaagccggaccagtcccctaagcccctgatctacgccacttccaacctggcctccggcgtgccgtcgaggttcagcggctcgggcagcgggaccgactacaccctgaccatcaacagccttgaagctgaggacgccgctacctactactgccagcagtggattttcaaccctcccacatttggacagggcactaagctggagattaagaccactaccccagcaccgaggccacccaccccggctcctaccatcgcctcccagcctctgtccctgcgtccggaggcatgtagacccgcagctggtggggccgtgcatacccggggtcttgacttcgcctgcgatatctacatttgggcccctctggctggtacttgcggggtcctgctgctttcactcgtgatcactctttactgtaagcgcggtcggaagaagctgctgtacatctttaagcaacccttcatgaggcctgtgcagactactcaagaggaggacggctgttcatgccggttcccagaggaggaggaaggcggctgcgaactgcgcgtgaaattcagccgcagcgcagatgctccagcctaccagcaggggcagaaccagctctacaacgaactcaatcttggtcggagagaggagtacgacgtgctggacaagcggagaggacgggacccagaaatgggcgggaagccgcgcagaaagaatccccaagagggcctgtacaacgagctccaaaaggataagatggcagaagcctatagcgagattggtatgaaaggggaacgcagaagaggcaaaggccacgacggactgtaccagggactcagcaccgccaccaaggacacctatgacgctcttcacatgcaggccctgccgcctcgg

SEQ ID NO: 1264 - protein, 5 aa, synthetic construct
  REGION 1..5: note = source = /note="Description of Artificial Sequence: Synthetic peptide"
RYNMH

SEQ ID NO: 1265 - protein, 17 aa, synthetic construct
  REGION 1..17: note = source = /note="Description of Artificial Sequence: Synthetic peptide"
AIYPGNGDTSYSQKFKG

SEQ ID NO: 1266 - protein, 13 aa, synthetic construct
  REGION 1..13: note = source = /note="Description of Artificial Sequence: Synthetic peptide"
SFFYGSSDWYFDV

SEQ ID NO: 1267 - protein, 7 aa, synthetic construct
  REGION 1..7: note = source = /note="Description of Artificial Sequence: Synthetic peptide"
GYTFTRY

SEQ ID NO: 1268 - protein, 6 aa, synthetic construct
  REGION 1..6: note = source = /note="Description of Artificial Sequence: Synthetic peptide"
YPGNGD

SEQ ID NO: 1269 - protein, 13 aa, synthetic construct
  REGION 1..13: note = source = /note="Description of Artificial Sequence: Synthetic peptide"
SFFYGSSDWYFDV

SEQ ID NO: 1270 - protein, 8 aa, synthetic construct
  REGION 1..8: note = source = /note="Description of Artificial Sequence: Synthetic peptide"
GYTFTRYN

SEQ ID NO: 1271 - protein, 8 aa, synthetic construct
  REGION 1..8: note = source = /note="Description of Artificial Sequence: Synthetic peptide"
IYPGNGDT

SEQ ID NO: 1272 - protein, 15 aa, synthetic construct
  REGION 1..15: note = source = /note="Description of Artificial Sequence: Synthetic peptide"
ARSFFYGSSDWYFDV

SEQ ID NO: 1273 - protein, 10 aa, synthetic construct
  REGION 1..10: note = source = /note="Description of Artificial Sequence: Synthetic peptide"
GYTFTRYNMH

SEQ ID NO: 1274 - protein, 17 aa, synthetic construct
  REGION 1..17: note = source = /note="Description of Artificial Sequence: Synthetic peptide"
AIYPGNGDTSYSQKFKG

SEQ ID NO: 1275 - protein, 13 aa, synthetic construct
  REGION 1..13: note = source = /note="Description of Artificial Sequence: Synthetic peptide"
SFFYGSSDWYFDV

SEQ ID NO: 1276 - protein, 122 aa, synthetic construct; identical to SEQ ID NO: 1243
  REGION 1..122: note = source = /note="Description of Artificial Sequence: Synthetic polypeptide"

SEQ ID NO: 1277 - DNA, 366 bp, synthetic construct
  misc_feature 1..366: note = source = /note="Description of Artificial Sequence: Synthetic polynucleotide"
  source 1..366: mol_type = other DNA
caagtgcaactcgtccaatccggcgcggaagtcaaaaagcctggagcctccgtcaaagtgtcctgcaaggcctccggttacactttcactcgctacaacatgcattgggtgcggcaggccccgggacagcgcctggaatggatgggcgcaatctaccccggcaacggagacacctcctattcccaaaagttcaagggaagggtcacaatcacggccgacaagagcgcctcaactgcctacatggagctgagcagcctcagatccgaagataccgcggtgtactactgcgcccggagcttcttctacggttcgtctgattggtactttgacgtctggggccagggaaccaccgtgaccgtgtcgtcc

SEQ ID NO: 1278 - protein, 10 aa, synthetic construct
  REGION 1..10: note = source = /note="Description of Artificial Sequence: Synthetic peptide"
RASSSVNNMH

SEQ ID NO: 1279 - protein, 7 aa, synthetic construct
  REGION 1..7: note = source = /note="Description of Artificial Sequence: Synthetic peptide"
ATSNLAS

SEQ ID NO: 1280 - protein, 9 aa, synthetic construct
  REGION 1..9: note = source = /note="Description of Artificial Sequence: Synthetic peptide"
QQWIFNPPT

SEQ ID NO: 1281 - protein, 6 aa, synthetic construct
  REGION 1..6: note = source = /note="Description of Artificial Sequence: Synthetic peptide"
SSSVNN

SEQ ID NO: 1282 - skipped

SEQ ID NO: 1283 - protein, 6 aa, synthetic construct
  REGION 1..6: note = source = /note="Description of Artificial Sequence: Synthetic peptide"
WIFNPP

SEQ ID NO: 1284 - protein, 5 aa, synthetic construct
  REGION 1..5: note = source = /note="Description of Artificial Sequence: Synthetic peptide"
SSVNN

SEQ ID NO: 1285 - skipped

SEQ ID NO: 1286 - protein, 9 aa, synthetic construct
  REGION 1..9: note = source = /note="Description of Artificial Sequence: Synthetic peptide"
QQWIFNPPT

SEQ ID NO: 1287 - protein, 10 aa, synthetic construct
  REGION 1..10: note = source = /note="Description of Artificial Sequence: Synthetic peptide"
RASSSVNNMH

SEQ ID NO: 1288 - protein, 7 aa, synthetic construct
  REGION 1..7: note = source = /note="Description of Artificial Sequence: Synthetic peptide"
ATSNLAS

SEQ ID NO: 1289 - protein, 9 aa, synthetic construct
  REGION 1..9: note = source = /note="Description of Artificial Sequence: Synthetic peptide"
QQWIFNPPT

SEQ ID NO: 1290 - protein, 106 aa, synthetic construct
  REGION 1..106: note = source = /note="Description of Artificial Sequence: Synthetic polypeptide"
DIQLTQSPSFLSASVGDRVTITCRASSSVNNMHWYQQKPGKAPKPLIYATSNLASGVPSRFSGSGSGTEYTLTISSLQPEDFATYYCQQWIFNPPTFGQGTKLEIK

SEQ ID NO: 1291 - DNA, 318 bp, synthetic construct
  misc_feature 1..318: note = source = /note="Description of Artificial Sequence: Synthetic polynucleotide"
  source 1..318: mol_type = other DNA
gacatccagcttacccagtcgccatcattcctgtccgcatcagtgggtgatcgcgtgaccattacctgtcgggcgtcctcctccgtgaacaacatgcactggtaccagcagaagccggggaaggctcccaagcctctgatctacgccactagcaatttggccagcggcgtgccttcgagattctcggggtcgggctcaggaaccgagtataccctgaccatttcctccctccaaccggaggactttgctacttactactgccagcagtggattttcaaccccccgactttcggacagggcaccaagctggaaatcaag

SEQ ID NO: 1292 - protein, 20 aa, synthetic construct
  REGION 1..20: note = source = /note="Description of Artificial Sequence: Synthetic peptide"
GGGGSGGGGSGGGGSGGGGS

SEQ ID NO: 1293 - protein, 248 aa, synthetic construct
  REGION 1..248: note = source = /note="Description of Artificial Sequence: Synthetic polypeptide"
QVQLVQSGAEVKKPGASVKVSCKASGYTFTRYNMHWVRQAPGQRLEWMGAIYPGNGDTSYSQKFKGRVTITADKSASTAYMELSSLRSEDTAVYYCARSFFYGSSDWYFDVWGQGTTVTVSSGGGGSGGGGSGGGGSGGGGSDIQLTQSPSFLSASVGDRVTITCRASSSVNNMHWYQQKPGKAPKPLIYATSNLASGVPSRFSGSGSGTEYTLTISSLQPEDFATYYCQQWIFNPPTFGQGTKLEIK

SEQ ID NO: 1294 - DNA, 744 bp, synthetic construct
  misc_feature 1..744: note = source = /note="Description of Artificial Sequence: Synthetic polynucleotide"
  source 1..744: mol_type = other DNA
caagtgcaactcgtccaatccggcgcggaagtcaaaaagcctggagcctccgtcaaagtgtcctgcaaggcctccggttacactttcactcgctacaacatgcattgggtgcggcaggccccgggacagcgcctggaatggatgggcgcaatctaccccggcaacggagacacctcctattcccaaaagttcaagggaagggtcacaatcacggccgacaagagcgcctcaactgcctacatggagctgagcagcctcagatccgaagataccgcggtgtactactgcgcccggagcttcttctacggttcgtctgattggtactttgacgtctggggccagggaaccaccgtgaccgtgtcgtccggtggcggagggagcggtggaggaggctccgggggaggaggcagcggcgggggaggcagcgacatccagcttacccagtcgccatcattcctgtccgcatcagtgggtgatcgcgtgaccattacctgtcgggcgtcctcctccgtgaacaacatgcactggtaccagcagaagccggggaaggctcccaagcctctgatctacgccactagcaatttggccagcggcgtgccttcgagattctcggggtcgggctcaggaaccgagtataccctgaccatttcctccctccaaccggaggactttgctacttactactgccagcagtggattttcaaccccccgactttcggacagggcaccaagctggaaatcaag

SEQ ID NO: 1295 - protein, 492 aa, synthetic construct
  REGION 1..492: note = source = /note="Description of Artificial Sequence: Synthetic polypeptide"
MALPVTALLLPLALLLHAARPQVQLVQSGAEVKKPGASVKVSCKASGYTFTRYNMHWVRQAPGQRLEWMGAIYPGNGDTSYSQKFKGRVTITADKSASTAYMELSSLRSEDTAVYYCARSFFYGSSDWYFDVWGQGTTVTVSSGGGGSGGGGSGGGGSGGGGSDIQLTQSPSFLSASVGDRVTITCRASSSVNNMHWYQQKPGKAPKPLIYATSNLASGVPSRFSGSGSGTEYTLTISSLQPEDFATYYCQQWIFNPPTFGQGTKLEIKTTTPAPRPPTPAPTIASQPLSLRPEACRPAAGGAVHTRGLDFACDIYIWAPLAGTCGVLLLSLVITLYCKRGRKKLLYIFKQPFMRPVQTTQEEDGCSCRFPEEEEGGCELRVKFSRSADAPAYQQGQNQLYNELNLGRREEYDVLDKRRGRDPEMGGKPRRKNPQEGLYNELQKDKMAEAYSEIGMKGERRRGKGHDGLYQGLSTATKDTYDALHMQALPPR

SEQ ID NO: 1296 - DNA, 1476 bp, synthetic construct
  misc_feature 1..1476: note = source = /note="Description of Artificial Sequence: Synthetic polynucleotide"
  source 1..1476: mol_type = other DNA
atggccctccctgtcaccgccctgctgcttccgctggctcttctgctccacgccgctcggccccaagtgcaactcgtccaatccggcgcggaagtcaaaaagcctggagcctccgtcaaagtgtcctgcaaggcctccggttacactttcactcgctacaacatgcattgggtgcggcaggccccgggacagcgcctggaatggatgggcgcaatctaccccggcaacggagacacctcctattcccaaaagttcaagggaagggtcacaatcacggccgacaagagcgcctcaactgcctacatggagctgagcagcctcagatccgaagataccgcggtgtactactgcgcccggagcttcttctacggttcgtctgattggtactttgacgtctggggccagggaaccaccgtgaccgtgtcgtccggtggcggagggagcggtggaggaggctccgggggaggaggcagcggcgggggaggcagcgacatccagcttacccagtcgccatcattcctgtccgcatcagtgggtgatcgcgtgaccattacctgtcgggcgtcctcctccgtgaacaacatgcactggtaccagcagaagccggggaaggctcccaagcctctgatctacgccactagcaatttggccagcggcgtgccttcgagattctcggggtcgggctcaggaaccgagtataccctgaccatttcctccctccaaccggaggactttgctacttactactgccagcagtggattttcaaccccccgactttcggacagggcaccaagctggaaatcaagaccactaccccagcaccgaggccacccaccccggctcctaccatcgcctcccagcctctgtccctgcgtccggaggcatgtagacccgcagctggtggggccgtgcatacccggggtcttgacttcgcctgcgatatctacatttgggcccctctggctggtacttgcggggtcctgctgctttcactcgtgatcactctttactgtaagcgcggtcggaagaagctgctgtacatctttaagcaacccttcatgaggcctgtgcagactactcaagaggaggacggctgttcatgccggttcccagaggaggaggaaggcggctgcgaactgcgcgtgaaattcagccgcagcgcagatgctccagcctaccagcaggggcagaaccagctctacaacgaactcaatcttggtcggagagaggagtacgacgtgctggacaagcggagaggacgggacccagaaatgggcgggaagccgcgcagaaagaatccccaagagggcctgtacaacgagctccaaaaggataagatggcagaagcctatagcgagattggtatgaaaggggaacgcagaagaggcaaaggccacgacggactgtaccagggactcagcaccgccaccaaggacacctatgacgctcttcacatgcaggccctgccgcctcgg

SEQ ID NO: 1297 - protein, 5 aa, synthetic construct
  REGION 1..5: note = source = /note="Description of Artificial Sequence: Synthetic peptide"
RYNMH

SEQ ID NO: 1298 - protein, 17 aa, synthetic construct
  REGION 1..17: note = source = /note="Description of Artificial Sequence: Synthetic peptide"
AIYPGNGDTSYSQKFKG

SEQ ID NO: 1299 - protein, 13 aa, synthetic construct
  REGION 1..13: note = source = /note="Description of Artificial Sequence: Synthetic peptide"
SFFYGSSDWYFDV

SEQ ID NO: 1300 - protein, 7 aa, synthetic construct
  REGION 1..7: note = source = /note="Description of Artificial Sequence: Synthetic peptide"
GYTFTRY

SEQ ID NO: 1301 - protein, 6 aa, synthetic construct
  REGION 1..6: note = source = /note="Description of Artificial Sequence: Synthetic peptide"
YPGNGD

SEQ ID NO: 1302 - protein, 13 aa, synthetic construct
  REGION 1..13: note = source = /note="Description of Artificial Sequence: Synthetic peptide"
SFFYGSSDWYFDV

SEQ ID NO: 1303 - protein, 8 aa, synthetic construct
  REGION 1..8: note = source = /note="Description of Artificial Sequence: Synthetic peptide"
GYTFTRYN

SEQ ID NO: 1304 - protein, 8 aa, synthetic construct
  REGION 1..8: note = source = /note="Description of Artificial Sequence: Synthetic peptide"
IYPGNGDT

SEQ ID NO: 1305 - protein, 15 aa, synthetic construct
  REGION 1..15: note = source = /note="Description of Artificial Sequence: Synthetic peptide"
ARSFFYGSSDWYFDV

SEQ ID NO: 1306 - protein, 10 aa, synthetic construct
  REGION 1..10: note = source = /note="Description of Artificial Sequence: Synthetic peptide"
GYTFTRYNMH

SEQ ID NO: 1307 - protein, 17 aa, synthetic construct
  REGION 1..17: note = source = /note="Description of Artificial Sequence: Synthetic peptide"
AIYPGNGDTSYSQKFKG

SEQ ID NO: 1308 - protein, 13 aa, synthetic construct
  REGION 1..13: note = source = /note="Description of Artificial Sequence: Synthetic peptide"
SFFYGSSDWYFDV

SEQ ID NO: 1309 - protein, 122 aa, synthetic construct
  REGION 1..122: note = source = /note="Description of Artificial Sequence: Synthetic polypeptide"
QVQLVQSGAEVKKPGSSVKVSCKASGYTFTRYNMHWVRQAPGQGLEWMGAIYPGNGDTSYSQKFKGRVTITADKSTSTAYMELSSLRSEDTAVYYCARSFFYGSSDWYFDVWGQGTTVTVSS

SEQ ID NO: 1310 - DNA, 366 bp, synthetic construct
  misc_feature 1..366: note = source = /note="Description of Artificial Sequence: Synthetic polynucleotide"
  source 1..366: mol_type = other DNA
caagtgcaactcgtccagtccggtgcagaagtcaagaagcctggttcctccgtgaaagtgtcctgcaaagcgtctggctacaccttcacccggtacaatatgcactgggtcagacaggcgcccggacagggcctggagtggatgggggccatctaccctgggaacggcgacactagctactcccaaaagttcaagggccgcgtgacgattaccgccgacaagtcaaccagcactgcctatatggagctgagctcgcttcggagcgaagataccgccgtgtactactgcgctcggagcttcttctacgggtcctcggattggtacttcgacgtctggggccaggggactactgtgaccgtgtcctcc

SEQ ID NO: 1311 - protein, 10 aa, synthetic construct
  REGION 1..10: note = source = /note="Description of Artificial Sequence: Synthetic peptide"
RASSSVNNMH

SEQ ID NO: 1312 - protein, 7 aa, synthetic construct
  REGION 1..7: note = source = /note="Description of Artificial Sequence: Synthetic peptide"
ATSNLAS

SEQ ID NO: 1313 - protein, 9 aa, synthetic construct
  REGION 1..9: note = source = /note="Description of Artificial Sequence: Synthetic peptide"
QQWIFNPPT

SEQ ID NO: 1314 - protein, 6 aa, synthetic construct
  REGION 1..6: note = source = /note="Description of Artificial Sequence: Synthetic peptide"
SSSVNN

SEQ ID NO: 1315 - skipped

SEQ ID NO: 1316 - protein, 6 aa, synthetic construct
  REGION 1..6: note = source = /note="Description of Artificial Sequence: Synthetic peptide"
WIFNPP

SEQ ID NO: 1317 - protein, 5 aa, synthetic construct
  REGION 1..5: note = source = /note="Description of Artificial Sequence: Synthetic peptide"
SSVNN

SEQ ID NO: 1318 - skipped

SEQ ID NO: 1319 - protein, 9 aa, synthetic construct
  REGION 1..9: note = source = /note="Description of Artificial Sequence: Synthetic peptide"
QQWIFNPPT

SEQ ID NO: 1320 - protein, 10 aa, synthetic construct
  REGION 1..10: note = source = /note="Description of Artificial Sequence: Synthetic peptide"
RASSSVNNMH

SEQ ID NO: 1321 - protein, 7 aa, synthetic construct
  REGION 1..7: note = source = /note="Description of Artificial Sequence: Synthetic peptide"
ATSNLAS

SEQ ID NO: 1322 - protein, 9 aa, synthetic construct
  REGION 1..9: note = source = /note="Description of Artificial Sequence: Synthetic peptide"
QQWIFNPPT

SEQ ID NO: 1323 - protein, 106 aa, synthetic construct; identical to SEQ ID NO: 1257
  REGION 1..106: note = source = /note="Description of Artificial Sequence: Synthetic polypeptide"

SEQ ID NO: 1324 - DNA, 318 bp, synthetic construct
  misc_feature 1..318: note = source = /note="Description of Artificial Sequence: Synthetic polynucleotide"
  source 1..318: mol_type = other DNA
gaaatcgtgctgacccagtccccggactttcagtcagtgactcccaaggagaaggtcaccattacttgtcgcgcctcctcctcggtgaacaacatgcactggtaccagcagaagccggaccagtccccgaagcccctgatctatgctacctccaacttggcgtccggcgtgccgtcaaggttcagcggatcgggttccgggacagactacaccctgactattaactcactcgaggccgaggatgccgccacctactactgccagcagtggatcttcaaccctccaaccttcggacaaggaaccaagctggaaatcaag

SEQ ID NO: 1325 - protein, 20 aa, synthetic construct
  REGION 1..20: note = source = /note="Description of Artificial Sequence: Synthetic peptide"
GGGGSGGGGSGGGGSGGGGS

SEQ ID NO: 1326 - protein, 248 aa, synthetic construct
  REGION 1..248: note = source = /note="Description of Artificial Sequence: Synthetic polypeptide"
QVQLVQSGAEVKKPGSSVKVSCKASGYTFTRYNMHWVRQAPGQGLEWMGAIYPGNGDTSYSQKFKGRVTITADKSTSTAYMELSSLRSEDTAVYYCARSFFYGSSDWYFDVWGQGTTVTVSSGGGGSGGGGSGGGGSGGGGSEIVLTQSPDFQSVTPKEKVTITCRASSSVNNMHWYQQKPDQSPKPLIYATSNLASGVPSRFSGSGSGTDYTLTINSLEAEDAATYYCQQWIFNPPTFGQGTKLEIK

SEQ ID NO: 1327 - DNA, 744 bp, synthetic construct
  misc_feature 1..744: note = source = /note="Description of Artificial Sequence: Synthetic polynucleotide"
  source 1..744: mol_type = other DNA
caagtgcaactcgtccagtccggtgcagaagtcaagaagcctggttcctccgtgaaagtgtcctgcaaagcgtctggctacaccttcacccggtacaatatgcactgggtcagacaggcgcccggacagggcctggagtggatgggggccatctaccctgggaacggcgacactagctactcccaaaagttcaagggccgcgtgacgattaccgccgacaagtcaaccagcactgcctatatggagctgagctcgcttcggagcgaagataccgccgtgtactactgcgctcggagcttcttctacgggtcctcggattggtacttcgacgtctggggccaggggactactgtgaccgtgtcctccgggggaggaggatcgggcggaggcggttcgggaggcggcggaagcggaggcggaggttcagaaatcgtgctgacccagtccccggactttcagtcagtgactcccaaggagaaggtcaccattacttgtcgcgcctcctcctcggtgaacaacatgcactggtaccagcagaagccggaccagtccccgaagcccctgatctatgctacctccaacttggcgtccggcgtgccgtcaaggttcagcggatcgggttccgggacagactacaccctgactattaactcactcgaggccgaggatgccgccacctactactgccagcagtggatcttcaaccctccaaccttcggacaaggaaccaagctggaaatcaag

SEQ ID NO: 1328 - protein, 492 aa, synthetic construct
  REGION 1..492: note = source = /note="Description of Artificial Sequence: Synthetic polypeptide"
MALPVTALLLPLALLLHAARPQVQLVQSGAEVKKPGSSVKVSCKASGYTFTRYNMHWVRQAPGQGLEWMGAIYPGNGDTSYSQKFKGRVTITADKSTSTAYMELSSLRSEDTAVYYCARSFFYGSSDWYFDVWGQGTTVTVSSGGGGSGGGGSGGGGSGGGGSEIVLTQSPDFQSVTPKEKVTITCRASSSVNNMHWYQQKPDQSPKPLIYATSNLASGVPSRFSGSGSGTDYTLTINSLEAEDAATYYCQQWIFNPPTFGQGTKLEIKTTTPAPRPPTPAPTIASQPLSLRPEACRPAAGGAVHTRGLDFACDIYIWAPLAGTCGVLLLSLVITLYCKRGRKKLLYIFKQPFMRPVQTTQEEDGCSCRFPEEEEGGCELRVKFSRSADAPAYQQGQNQLYNELNLGRREEYDVLDKRRGRDPEMGGKPRRKNPQEGLYNELQKDKMAEAYSEIGMKGERRRGKGHDGLYQGLSTATKDTYDALHMQALPPR

SEQ ID NO: 1329 - DNA, 1476 bp, synthetic construct
  misc_feature 1..1476: note = source = /note="Description of Artificial Sequence: Synthetic polynucleotide"
  source 1..1476: mol_type = other DNA
atggccctccctgtcaccgccctgctgcttccgctggctcttctgctccacgccgctcggccccaagtgcaactcgtccagtccggtgcagaagtcaagaagcctggttcctccgtgaaagtgtcctgcaaagcgtctggctacaccttcacccggtacaatatgcactgggtcagacaggcgcccggacagggcctggagtggatgggggccatctaccctgggaacggcgacactagctactcccaaaagttcaagggccgcgtgacgattaccgccgacaagtcaaccagcactgcctatatggagctgagctcgcttcggagcgaagataccgccgtgtactactgcgctcggagcttcttctacgggtcctcggattggtacttcgacgtctggggccaggggactactgtgaccgtgtcctccgggggaggaggatcgggcggaggcggttcgggaggcggcggaagcggaggcggaggttcagaaatcgtgctgacccagtccccggactttcagtcagtgactcccaaggagaaggtcaccattacttgtcgcgcctcctcctcggtgaacaacatgcactggtaccagcagaagccggaccagtccccgaagcccctgatctatgctacctccaacttggcgtccggcgtgccgtcaaggttcagcggatcgggttccgggacagactacaccctgactattaactcactcgaggccgaggatgccgccacctactactgccagcagtggatcttcaaccctccaaccttcggacaaggaaccaagctggaaatcaagaccactaccccagcaccgaggccacccaccccggctcctaccatcgcctcccagcctctgtccctgcgtccggaggcatgtagacccgcagctggtggggccgtgcatacccggggtcttgacttcgcctgcgatatctacatttgggcccctctggctggtacttgcggggtcctgctgctttcactcgtgatcactctttactgtaagcgcggtcggaagaagctgctgtacatctttaagcaacccttcatgaggcctgtgcagactactcaagaggaggacggctgttcatgccggttcccagaggaggaggaaggcggctgcgaactgcgcgtgaaattcagccgcagcgcagatgctccagcctaccagcaggggcagaaccagctctacaacgaactcaatcttggtcggagagaggagtacgacgtgctggacaagcggagaggacgggacccagaaatgggcgggaagccgcgcagaaagaatccccaagagggcctgtacaacgagctccaaaaggataagatggcagaagcctatagcgagattggtatgaaaggggaacgcagaagaggcaaaggccacgacggactgtaccagggactcagcaccgccaccaaggacacctatgacgctcttcacatgcaggccctgccgcctcgg

SEQ ID NO: 1330 - protein, 5 aa, synthetic construct
  REGION 1..5: note = source = /note="Description of Artificial Sequence: Synthetic peptide"
RYNMH

SEQ ID NO: 1331 - protein, 17 aa, synthetic construct
  REGION 1..17: note = source = /note="Description of Artificial Sequence: Synthetic peptide"
AIYPGNGDTSYSQKFKG

SEQ ID NO: 1332 - protein, 13 aa, synthetic construct
  REGION 1..13: note = source = /note="Description of Artificial Sequence: Synthetic peptide"
SFFYGSSDWYFDV

SEQ ID NO: 1333 - protein, 7 aa, synthetic construct
  REGION 1..7: note = source = /note="Description of Artificial Sequence: Synthetic peptide"
GYTFTRY

SEQ ID NO: 1334 - protein, 6 aa, synthetic construct
  REGION 1..6: note = source = /note="Description of Artificial Sequence: Synthetic peptide"
YPGNGD

SEQ ID NO: 1335 - protein, 13 aa, synthetic construct
  REGION 1..13: note = source = /note="Description of Artificial Sequence: Synthetic peptide"
SFFYGSSDWYFDV

SEQ ID NO: 1336 - protein, 8 aa, synthetic construct
  REGION 1..8: note = source = /note="Description of Artificial Sequence: Synthetic peptide"
GYTFTRYN

SEQ ID NO: 1337 - protein, 8 aa, synthetic construct
  REGION 1..8: note = source = /note="Description of Artificial Sequence: Synthetic peptide"
IYPGNGDT

SEQ ID NO: 1338 - protein, 15 aa, synthetic construct
  REGION 1..15: note = source = /note="Description of Artificial Sequence: Synthetic peptide"
ARSFFYGSSDWYFDV

SEQ ID NO: 1339 - protein, 10 aa, synthetic construct
  REGION 1..10: note = source = /note="Description of Artificial Sequence: Synthetic peptide"
GYTFTRYNMH

SEQ ID NO: 1340 - protein, 17 aa, synthetic construct
  REGION 1..17: note = source = /note="Description of Artificial Sequence: Synthetic peptide"
AIYPGNGDTSYSQKFKG

SEQ ID NO: 1341 - protein, 13 aa, synthetic construct
  REGION 1..13: note = source = /note="Description of Artificial Sequence: Synthetic peptide"
SFFYGSSDWYFDV

SEQ ID NO: 1342 - protein, 122 aa, synthetic construct; identical to SEQ ID NO: 1309
  REGION 1..122: note = source = /note="Description of Artificial Sequence: Synthetic polypeptide"

SEQ ID NO: 1343 - DNA, 366 bp, synthetic construct
  misc_feature 1..366: note = source = /note="Description of Artificial Sequence: Synthetic polynucleotide"
  source 1..366: mol_type = other DNA
caagtccaactcgtccagtctggcgcagaagtcaagaagcccggaagctccgtgaaagtgtcctgcaaagcgtcgggttacactttcacccggtacaacatgcactgggtcagacaggcccctggacaaggactggagtggatgggtgccatctaccctggaaacggagatacctcctactcccaaaagttcaaggggagagtgaccattaccgccgacaagtcaacttccaccgcttacatggagctcagctccctgcggtccgaagatactgcggtgtactattgcgctcgctcatttttctacggctcatcggattggtacttcgacgtctggggacagggaactaccgtgaccgtgtcctcg

SEQ ID NO: 1344 - protein, 10 aa, synthetic construct
  REGION 1..10: note = source = /note="Description of Artificial Sequence: Synthetic peptide"
RASSSVNNMH

SEQ ID NO: 1345 - protein, 7 aa, synthetic construct
  REGION 1..7: note = source = /note="Description of Artificial Sequence: Synthetic peptide"
ATSNLAS

SEQ ID NO: 1346 - protein, 9 aa, synthetic construct
  REGION 1..9: note = source = /note="Description of Artificial Sequence: Synthetic peptide"
QQWIFNPPT

SEQ ID NO: 1347 - protein, 6 aa, synthetic construct
  REGION 1..6: note = source = /note="Description of Artificial Sequence: Synthetic peptide"
SSSVNN

SEQ ID NO: 1348 - skipped

SEQ ID NO: 1349 - protein, 6 aa, synthetic construct
  REGION 1..6: note = source = /note="Description of Artificial Sequence: Synthetic peptide"
WIFNPP

SEQ ID NO: 1350 - protein, 5 aa, synthetic construct
  REGION 1..5: note = source = /note="Description of Artificial Sequence: Synthetic peptide"
SSVNN

SEQ ID NO: 1351 - skipped

SEQ ID NO: 1352 - protein, 9 aa, synthetic construct
  REGION 1..9: note = source = /note="Description of Artificial Sequence: Synthetic peptide"
QQWIFNPPT

SEQ ID NO: 1353 - protein, 10 aa, synthetic construct
  REGION 1..10: note = source = /note="Description of Artificial Sequence: Synthetic peptide"
RASSSVNNMH

SEQ ID NO: 1354 - protein, 7 aa, synthetic construct
  REGION 1..7: note = source = /note="Description of Artificial Sequence: Synthetic peptide"
ATSNLAS

SEQ ID NO: 1355 - protein, 9 aa, synthetic construct
  REGION 1..9: note = source = /note="Description of Artificial Sequence: Synthetic peptide"
QQWIFNPPT

SEQ ID NO: 1356 - protein, 106 aa, synthetic construct; identical to SEQ ID NO: 1290
  REGION 1..106: note = source = /note="Description of Artificial Sequence: Synthetic polypeptide"

SEQ ID NO: 1357 - DNA, 318 bp, synthetic construct
  misc_feature 1..318: note = source = /note="Description of Artificial Sequence: Synthetic polynucleotide"
  source 1..318: mol_type = other DNA
gacatccagctgactcagtccccgtccttcctgtccgcctccgtgggggaccgcgtgacgattacttgtcgggcctcctcatccgtgaacaacatgcattggtaccagcagaagccaggaaaggcaccgaagccgcttatctatgccacctcgaatctggccagcggagtgccttcgaggtttagcggctccggctccggcaccgagtacactttgaccattagcagcctccagccggaggacttcgccacatactactgccagcagtggatcttcaacccccccaccttcggccaaggaaccaagctggaaatcaag

SEQ ID NO: 1358 - protein, 20 aa, synthetic construct
  REGION 1..20: note = source = /note="Description of Artificial Sequence: Synthetic peptide"
GGGGSGGGGSGGGGSGGGGS

SEQ ID NO: 1359 - protein, 248 aa, synthetic construct
  REGION 1..248: note = source = /note="Description of Artificial Sequence: Synthetic polypeptide"
QVQLVQSGAEVKKPGSSVKVSCKASGYTFTRYNMHWVRQAPGQGLEWMGAIYPGNGDTSYSQKFKGRVTITADKSTSTAYMELSSLRSEDTAVYYCARSFFYGSSDWYFDVWGQGTTVTVSSGGGGSGGGGSGGGGSGGGGSDIQLTQSPSFLSASVGDRVTITCRASSSVNNMHWYQQKPGKAPKPLIYATSNLASGVPSRFSGSGSGTEYTLTISSLQPEDFATYYCQQWIFNPPTFGQGTKLEIK

SEQ ID NO: 1360 - DNA, 744 bp, synthetic construct
  misc_feature 1..744: note = source = /note="Description of Artificial Sequence: Synthetic polynucleotide"
  source 1..744: mol_type = other DNA
caagtccaactcgtccagtctggcgcagaagtcaagaagcccggaagctccgtgaaagtgtcctgcaaagcgtcgggttacactttcacccggtacaacatgcactgggtcagacaggcccctggacaaggactggagtggatgggtgccatctaccctggaaacggagatacctcctactcccaaaagttcaaggggagagtgaccattaccgccgacaagtcaacttccaccgcttacatggagctcagctccctgcggtccgaagatactgcggtgtactattgcgctcgctcatttttctacggctcatcggattggtacttcgacgtctggggacagggaactaccgtgaccgtgtcctcggggggaggaggatcgggcggaggcggttcgggaggcggcggaagcggaggcggaggttcagacatccagctgactcagtccccgtccttcctgtccgcctccgtgggggaccgcgtgacgattacttgtcgggcctcctcatccgtgaacaacatgcattggtaccagcagaagccaggaaaggcaccgaagccgcttatctatgccacctcgaatctggccagcggagtgccttcgaggtttagcggctccggctccggcaccgagtacactttgaccattagcagcctccagccggaggacttcgccacatactactgccagcagtggatcttcaacccccccaccttcggccaaggaaccaagctggaaatcaag

SEQ ID NO: 1361 - protein, 492 aa, synthetic construct
  REGION 1..492: note = source = /note="Description of Artificial Sequence: Synthetic polypeptide"
MALPVTALLLPLALLLHAARPQVQLVQSGAEVKKPGSSVKVSCKASGYTFTRYNMHWVRQAPGQGLEWMGAIYPGNGDTSYSQKFKGRVTITADKSTSTAYMELSSLRSEDTAVYYCARSFFYGSSDWYFDVWGQGTTVTVSSGGGGSGGGGSGGGGSGGGGSDIQLTQSPSFLSASVGDRVTITCRASSSVNNMHWYQQKPGKAPKPLIYATSNLASGVPSRFSGSGSGTEYTLTISSLQPEDFATYYCQQWIFNPPTFGQGTKLEIKTTTPAPRPPTPAPTIASQPLSLRPEACRPAAGGAVHTRGLDFACDIYIWAPLAGTCGVLLLSLVITLYCKRGRKKLLYIFKQPFMRPVQTTQEEDGCSCRFPEEEEGGCELRVKFSRSADAPAYQQGQNQLYNELNLGRREEYDVLDKRRGRDPEMGGKPRRKNPQEGLYNELQKDKMAEAYSEIGMKGERRRGKGHDGLYQGLSTATKDTYDALHMQALPPR

SEQ ID NO: 1362 - DNA, 1476 bp, synthetic construct
  misc_feature 1..1476: note = source = /note="Description of Artificial Sequence: Synthetic polynucleotide"
  source 1..1476: mol_type = other DNA
atggccctccctgtcaccgccctgctgcttccgctggctcttctgctccacgccgctcggccccaagtccaactcgtccagtctggcgcagaagtcaagaagcccggaagctccgtgaaagtgtcctgcaaagcgtcgggttacactttcacccggtacaacatgcactgggtcagacaggcccctggacaaggactggagtggatgggtgccatctaccctggaaacggagatacctcctactcccaaaagttcaaggggagagtgaccattaccgccgacaagtcaacttccaccgcttacatggagctcagctccctgcggtccgaagatactgcggtgtactattgcgctcgctcatttttctacggctcatcggattggtacttcgacgtctggggacagggaactaccgtgaccgtgtcctcggggggaggggggagcggcggagggggctcgggcggtggaggaagcggaggcggcggttcggacatccagctgactcagtccccgtccttcctgtccgcctccgtgggggaccgcgtgacgattacttgtcgggcctcctcatccgtgaacaacatgcattggtaccagcagaagccaggaaaggcaccgaagccgcttatctatgccacctcgaatctggccagcggagtgccttcgaggtttagcggctccggctccggcaccgagtacactttgaccattagcagcctccagccggaggacttcgccacatactactgccagcagtggatcttcaacccccccaccttcggccaaggaaccaagctggaaatcaagaccactaccccagcaccgaggccacccaccccggctcctaccatcgcctcccagcctctgtccctgcgtccggaggcatgtagacccgcagctggtggggccgtgcatacccggggtcttgacttcgcctgcgatatctacatttgggcccctctggctggtacttgcggggtcctgctgctttcactcgtgatcactctttactgtaagcgcggtcggaagaagctgctgtacatctttaagcaacccttcatgaggcctgtgcagactactcaagaggaggacggctgttcatgccggttcccagaggaggaggaaggcggctgcgaactgcgcgtgaaattcagccgcagcgcagatgctccagcctaccagcaggggcagaaccagctctacaacgaactcaatcttggtcggagagaggagtacgacgtgctggacaagcggagaggacgggacccagaaatgggcgggaagccgcgcagaaagaatccccaagagggcctgtacaacgagctccaaaaggataagatggcagaagcctatagcgagattggtatgaaaggggaacgcagaagaggcaaaggccacgacggactgtaccagggactcagcaccgccaccaaggacacctatgacgctcttcacatgcaggccctgccgcctcgg

SEQ ID NO: 1363 - protein, 122 aa, synthetic construct
  REGION 1..122: note = source = /note="Description of Artificial Sequence: Synthetic polypeptide"
QVHLQQSGAELAKPGASVKMSCKASGYTFTNYWMHWVKQRPGQGLEWIGFITPTTGYPEYNQKFKDKATLTADKSSSTAYMQLSSLTSEDSAVYYCARRKVGKGVYYALDYWGQGTSVTVSS

SEQ ID NO: 1364 - DNA, 366 bp, synthetic construct
  misc_feature 1..366: note = source = /note="Description of Artificial Sequence: Synthetic polynucleotide"
  source 1..366: mol_type = other DNA
caagtgcatctgcagcagtcgggggccgaactggcaaagccaggcgccagcgtgaagatgagctgcaaggcctccgggtacaccttcaccaactactggatgcactgggtcaagcagcgcccgggccagggactcgagtggatcgggttcatcacgccgactaccggctacccggagtataaccagaagttcaaggacaaggccactctgactgccgacaagtcctcgtctaccgcgtacatgcaactgtcctcactgacttcggaggattccgctgtgtactactgcgcgcggaggaaagtcggaaagggagtgtactatgccctggactactggggccagggtaccagcgtcactgtgtcctcc

SEQ ID NO: 1365 - protein, 107 aa, synthetic construct
  REGION 1..107: note = source = /note="Description of Artificial Sequence: Synthetic polypeptide"
DILMTQSPASLSASVGETVTITCRASGNIHNYLAWYQQKQGNSPQLLVYNTKTLADGVPSRFSGSGSGTQYSLKINSLQTEDFGTYYCQHFWSSPWTFGGGTKLEIK

SEQ ID NO: 1366 - DNA, 321 bp, synthetic construct
  misc_feature 1..321: note = source = /note="Description of Artificial Sequence: Synthetic polynucleotide"
  source 1..321: mol_type = other DNA
gacattctgatgacccagtcccctgcatcactctccgcgtccgtgggagaaaccgtgaccatcacgtgtagagcctccggcaacatccacaactacctggcctggtaccagcagaagcagggaaactcgccccaactgcttgtgtacaacaccaagaccttggctgacggagtgccttcccggttctcgggttcgggatcaggcacacagtactccctgaaaatcaatagcctccagaccgaagattttggaacctactactgccaacacttctggagctccccctggactttcggaggcggtaccaagctcgagattaag

SEQ ID NO: 1367 - protein, 122 aa, synthetic construct
  REGION 1..122: note = source = /note="Description of Artificial Sequence: Synthetic polypeptide"
QVQLQQPGAELVKPGASVKMSCKASGYTFTNYNLHWVKQTPGQGLEWIGAIYPGNYDTSYNQKFKGKATLTADKSSSTAYMLLSSLTSEDSAVYFCARVDFGHSRYWYFDVWGAGTTVTVSS

SEQ ID NO: 1368 - DNA, 366 bp, synthetic construct
  misc_feature 1..366: note = source = /note="Description of Artificial Sequence: Synthetic polynucleotide"
  source 1..366: mol_type = other DNA
caagtgcagctgcagcagcctggtgccgagctcgtgaagccgggagcgtccgtgaagatgagctgcaaagcctcgggctacaccttcaccaattacaacttgcattgggtcaagcagaccccgggccagggcctcgaatggatcggagcgatctaccccgggaactacgatactagctacaaccagaagttcaagggaaaggccaccctgaccgccgataagtcctcatccaccgcctacatgctgctgtcctcgctgacttccgaggactccgctgtgtacttctgcgcccgcgtggacttcggacacagcagatattggtattttgacgtctggggcgccgggactaccgtgactgtgtcgtcc

SEQ ID NO: 1369 - protein, 106 aa, synthetic construct
  REGION 1..106: note = source = /note="Description of Artificial Sequence: Synthetic polypeptide"
QIVLSQSPAILSASPGEKVTMTCRATSSVSSMNWYQQKPGSFPRPWIHATSNLASGVPARFSGSGSGTSYSLTISRVEAEDAATYYCQQWTFNPPTFGAGAKLELK

SEQ ID NO: 1370 - DNA, 318 bp, synthetic construct
  misc_feature 1..318: note = source = /note="Description of Artificial Sequence: Synthetic polynucleotide"
  source 1..318: mol_type = other DNA
caaattgtcctgagccagagcccggctatcctgtccgcctcaccgggcgaaaaggtcaccatgacttgtcgggccacttcctccgtgtcatccatgaactggtaccagcagaagcctggcagcttccctcggccatggattcacgccacgtcaaacctggcatcgggagtgcccgcaaggttctccgggtccggcagcggaacatcctactccctcaccatctcgcgcgtggaagcggaggacgctgccacctactactgccaacagtggaccttcaacccccccacctttggagcgggagccaagctggaacttaag

SEQ ID NO: 1371 - protein, 122 aa, synthetic construct
  REGION 1..122: note = source = /note="Description of Artificial Sequence: Synthetic polypeptide"
QVQLQQPGAELVKPGASVKMSCKASGYTFTSYNMHWVKQTPGQGLEWIGAIYPGNGDTSYNPKFKGKATLTADKSSRTAYIHLSSLTSEDSVVYYCARSYFYGSSSWYFDVWGAGTTVTVSS

SEQ ID NO: 1372 - DNA, 366 bp, synthetic construct
  misc_feature 1..366: note = source = /note="Description of Artificial Sequence: Synthetic polynucleotide"
  source 1..366: mol_type = other DNA
caagtgcagctgcagcagccgggagcagagctcgtgaagcctggagcctcagtgaagatgagctgcaaggcctccggttacaccttcacctcctacaacatgcactgggtcaagcagacccccggacaaggcctggaatggatcggcgccatctacccgggaaacggggacacctcctataaccccaagttcaagggaaaagcaaccctgaccgcggacaagtccagcagaactgcctacatccatctttcctcgctgacgtccgaggattccgtggtgtactactgtgcccgctcctacttctacgggtcatcctcgtggtacttcgatgtctggggcgctggaaccaccgtgactgtgtcctcc

SEQ ID NO: 1373 - protein, 106 aa, synthetic construct
  REGION 1..106: note = source = /note="Description of Artificial Sequence: Synthetic polypeptide"
QIILSQSPAILSASPGEKVTLTCRASSSVSSMHWYQQKPGSSPKPWIFATSNLASGVPARFTGSGSGTSYSLTISRVEAEDAATYYCQQWIFNPPTFGGGTSLEIK

SEQ ID NO: 1374 - DNA, 318 bp, synthetic construct
  misc_feature 1..318: note = source = /note="Description of Artificial Sequence: Synthetic polynucleotide"
  source 1..318: mol_type = other DNA
cagatcattctgagccagagcccggccattctgtctgcctcgcctggagaaaaagtcaccctcacttgccgggccagctcctccgtgtcctcaatgcactggtaccagcagaagcctggctcaagcccgaagccctggatcttcgccacctccaatctggcgtcaggagtgcccgcgaggttcactggatcggggtccggcacatcgtattcgctcaccatttcccgggtggaggccgaggacgccgctacttactactgccaacagtggatcttcaacccaccgacctttggcggagggacttccttggaaatcaag

SEQ ID NO: 1375 - protein, 121 aa, synthetic construct
  REGION 1..121: note = source = /note="Description of Artificial Sequence: Synthetic polypeptide"
QIQLVQSGPELKKPGETVKISCKTSGYTFTSHGINWVKQAPRKGLKWMGWINTYTGEPTYGDDFKGRFAFSLETSARTAYLQINNLKNEDTATYFCARYGNYEEPYAMDYWGQGTSVTVSS

SEQ ID NO: 1376 - DNA, 363 bp, synthetic construct
  misc_feature 1..363: note = source = /note="Description of Artificial Sequence: Synthetic polynucleotide"
  source 1..363: mol_type = other DNA
caaattcagctggtgcagtcgggacctgagctcaagaagcccggagaaaccgtgaagatctcctgcaagacttccgggtacacttttacttcccacggcatcaactgggtcaagcaggcaccaaggaaggggcttaagtggatgggctggattaacacctacaccggcgaacccacctatggcgatgacttcaaaggacggttcgcgttctccctcgaaacctcagcaagaaccgcgtatttgcaaatcaacaacctgaagaacgaggacaccgccacctacttctgcgcccgctacggaaattacgaggaaccttacgctatggactactggggccagggcacttccgtgactgtgtcgtcc

SEQ ID NO: 1377 - protein, 106 aa, synthetic construct; identical to SEQ ID NO: 1369
  REGION 1..106: note = source = /note="Description of Artificial Sequence: Synthetic polypeptide"

SEQ ID NO: 1378 - DNA, 318 bp, synthetic construct
  misc_feature 1..318: note = source = /note="Description of Artificial Sequence: Synthetic polynucleotide"
  source 1..318: mol_type = other DNA
cagatcgtgctgagccagagccccgccatcctgagcgcttccccgggagaaaaggtcaccatgacttgccgggccactagcagcgtgtcctccatgaactggtaccagcagaagccgggctccttccctcgcccctggattcatgccacctcaaacctggccagcggagtgccagccagattctcgggatctggatcggggacgtcctactccctcaccatctcgcgggtggaggccgaagatgccgccacatactactgtcaacagtggaccttcaacccgccgacctttggagcgggggccaagctggagctgaaa

SEQ ID NO: 1379 - protein, 122 aa, synthetic construct
  REGION 1..122: note = source = /note="Description of Artificial Sequence: Synthetic polypeptide"
QVQLQQPGAELVKPGASVKMSCKASGYTFTSYNIHWVKQTPGQGLEWIGAIYPGNGDTSYNQKFKGKATLTADKSSTTAFIHFSSLTSEDSVVYYCARSYFYGSDSWYFDVWGAGTTVTVSS

SEQ ID NO: 1380 - DNA, 366 bp, synthetic construct
  misc_feature 1..366: note = source = /note="Description of Artificial Sequence: Synthetic polynucleotide"
  source 1..366: mol_type = other DNA
caagtgcagcttcagcagcctggggccgaactcgtgaagccaggagcctccgtgaagatgtcatgcaaagcctccggctacacttttacctcctacaacattcattgggtcaagcagacacctggccagggcctggaatggattggtgcaatctacccgggcaacggagacacctcgtacaaccagaagtttaaggggaaggccaccctgaccgcggacaagtcaagcactaccgcgttcattcacttctcgtccttgacctccgaggatagcgtggtgtactactgcgcccgctcctatttctacggctccgattcgtggtacttcgacgtctggggagccggaactaccgtgaccgtgtcctcc

SEQ ID NO: 1381 - protein, 106 aa, synthetic construct
  REGION 1..106: note = source = /note="Description of Artificial Sequence: Synthetic polypeptide"
QIILSQSPAILSASPGEKVTLTCRASSGVPSLHWYQQKPGSSPKPWIFATSNLASGVPARFSGSGSGTSYSLTISRVEAEDAATYYCQQWIFNPPTFGGGTSLEIK

SEQ ID NO: 1382 - DNA, 318 bp, synthetic construct
  misc_feature 1..318: note = source = /note="Description of Artificial Sequence: Synthetic polynucleotide"
  source 1..318: mol_type = other DNA
caaatcatcctgagccagagcccggccatcctgtcggcttcacccggggaaaaggtcacgctgacttgccgggcctcctccggcgtgccaagcctccactggtaccagcaaaagcctggctcgtcccccaaaccctggattttcgccacctccaacctggctagcggagtgccggccagattctcgggttccgggtccggcaccagctattctctcaccatctcccgggtcgaggcggaggacgcagcgacttactactgtcaacagtggatcttcaatccgcccaccttcggcggaggaacttccctggaaatcaag

SEQ ID NO: 1383 - protein, 122 aa, synthetic construct
  REGION 1..122: note = source = /note="Description of Artificial Sequence: Synthetic polypeptide"
QVQLLQPGAELVKPGASVKMSCKASGYTFTRYNMHWVKQTPGQGLEWIGAIYPGNGDTSYSQKFKGKATLTADKSSSTAYMQLSSLTSEDSAVYYCARSFFYGSSDWYFDVWGAGTTVSVSS

SEQ ID NO: 1384 - DNA, 366 bp, synthetic construct
  misc_feature 1..366: note = source = /note="Description of Artificial Sequence: Synthetic polynucleotide"
  source 1..366: mol_type = other DNA
caagtgcagctgctgcagcccggagccgaactcgtgaagccgggcgcatccgtgaaaatgagctgcaaggcgtccggttacaccttcactcgctacaacatgcactgggtcaagcagacccctggacaaggcctggagtggattggtgctatctacccgggaaacggagacactagctactcgcagaaattcaagggaaaggccacgctgaccgccgataagtcctcctccactgcctacatgcaactcagctcactgacctcagaggactcggccgtgtactactgcgcgaggtccttcttctacgggtcctcggattggtacttcgacgtctggggcgccggtaccaccgtgtccgtgtcatcc

SEQ ID NO: 1385 - protein, 106 aa, synthetic construct
  REGION 1..106: note = source = /note="Description of Artificial Sequence: Synthetic polypeptide"
QIVLSQSPAILSTSPGEKVTLTCRASSSVNNMHWYQQKPGSSPKPWIYATSNLASGVPSRFSGSGSGTSYSLTISRVEAEDAATYYCQQWIFNPPTFGAGTKLELK

SEQ ID NO: 1386 - DNA, 318 bp, synthetic construct
  misc_feature 1..318: note = source = /note="Description of Artificial Sequence: Synthetic polynucleotide"
  source 1..318: mol_type = other DNA
cagatcgtgctgagccagtccccggcgattctgtccacctcgcctggggaaaaggtcaccctgacatgtagagcctcctcctccgtgaacaatatgcattggtatcagcagaagccaggatcaagccccaagccctggatctatgccacttcgaaccttgcctctggagtgccctcacggttctccggctcgggatcggggaccagctacagcttgactatctcccgggtggaggctgaggacgccgcaacctactactgccagcaatggatcttcaaccctccgacttttggggccggaaccaagctggaactcaag

SEQ ID NO: 1387 - protein, 117 aa, synthetic construct
  REGION 1..117: note = source = /note="Description of Artificial Sequence: Synthetic polypeptide"
QVQLVESGGGVVQPGRSLRLSCAASGFTFRDYYMAWVRQAPGKGLEWVASISYEGNPYYGDSVKGRFTISRDNAKSTLYLQMSSLRAEDTAVYYCARHDHNNVDWFAYWGQGTLVTV

SEQ ID NO: 1388 - DNA, 357 bp, synthetic construct
  misc_feature 1..357: note = source = /note="Description of Artificial Sequence: Synthetic polynucleotide"
  source 1..357: mol_type = other DNA
caagtgcagttggtggaatcaggaggaggtgtcgtgcaaccaggaagatcattgaggctctcatgcgccgccagcggattcacctttcgggattactacatggcctgggtccgccaggccccggggaagggactggaatgggtggcatccatctcgtacgaagggaacccctactatggggactccgtgaagggacggttcaccatctcccgggacaacgccaagtccaccctgtaccttcaaatgtcctcgctgagggcggaggatactgctgtctactactgtgcccgccacgaccataacaacgtggactggttcgcctactggggccagggaaccctcgtcaccgtgtcctcg

SEQ ID NO: 1389 - protein, 112 aa, synthetic construct
  REGION 1..112: note = source = /note="Description of Artificial Sequence: Synthetic polypeptide"
DIVMTQTPLSLSVTPGQPVSMSCKSSQSLLYSENKKNYLAWYLQKPGQSPQLLIFWASTRESGVPDRFSGSGSGTDFTLKISRVEAEDVGVYYCQQYYNFPTFGQGTKLEIK

SEQ ID NO: 1390 - DNA, 336 bp, synthetic construct
  misc_feature 1..336: note = source = /note="Description of Artificial Sequence: Synthetic polynucleotide"
  source 1..336: mol_type = other DNA
gacattgtgatgacgcagactcccctgtcgctctccgtgacccctggccagcccgtgtcgatgtcgtgcaagagctcccagtccctgctgtattccgagaacaagaagaattaccttgcgtggtacctccagaagccggggcagagcccgcagctgctgattttctgggcgtccactagagagtctggagtgcctgaccggtttagcggaagcggctccggtactgatttcaccctgaaaatctcgcgcgtggaagctgaggacgtgggcgtgtactactgccagcagtactacaacttccctactttcggacaaggaaccaagctggaaatcaag

SEQ ID NO: 1391 - protein, 20 aa, synthetic construct
  REGION 1..20: note = source = /note="Description of Artificial Sequence: Synthetic peptide"
GGGGSGGGGSGGGGSGGGGS

SEQ ID NO: 1392 - protein, 251 aa, synthetic construct
  REGION 1..251: note = source = /note="Description of Artificial Sequence: Synthetic polypeptide"
QVQLVESGGGVVQPGRSLRLSCAASGFTFRDYYMAWVRQAPGKGLEWVASISYEGNPYYGDSVKGRFTISRDNAKSTLYLQMSSLRAEDTAVYYCARHDHNNVDWFAYWGQGTLVTVSSGGGGSGGGGSGGGGSGGGGSDIVMTQTPLSLSVTPGQPVSMSCKSSQSLLYSENKKNYLAWYLQKPGQSPQLLIFWASTRESGVPDRFSGSGSGTDFTLKISRVEAEDVGVYYCQQYYNFPTFGQGTKLEIK

SEQ ID NO: 1393 - protein, 119 aa, synthetic construct
  REGION 1..119: note = source = /note="Description of Artificial Sequence: Synthetic polypeptide"
QVQLVQSGAEVKKPGASVKVSCKASGFTFRDYYMAWVRQAPGQRLEWMGSISYEGNPYYGDSVKGRVTITRDNSASTLYMELSSLRSEDTAVYYCARHDHNNVDWFAYWGQGTLVTVSS

SEQ ID NO: 1394 - DNA, 357 bp, synthetic construct
  misc_feature 1..357: note = source = /note="Description of Artificial Sequence: Synthetic polynucleotide"
  source 1..357: mol_type = other DNA
caagtccaactcgtccagtccggtgcagaagtcaagaaaccaggagcttccgtgaaagtgtcgtgcaaagcttcaggcttcaccttccgcgactattacatggcctgggtccgccaagcgcccggacagcggctggagtggatggggtccatttcctacgaggggaacccctactatggagattccgtgaagggcagagtgacgatcactcgggataactccgcctccactctctacatggaactgtcctcgcttcggagcgaagataccgcggtgtactactgcgcccgccacgaccataacaacgtggactggttcgcctactggggacaggggaccctcgtgaccgtgtcctct

SEQ ID NO: 1395 - protein, 112 aa, synthetic construct
  REGION 1..112: note = source = /note="Description of Artificial Sequence: Synthetic polypeptide"
DIQMTQSPSSLSASVGDRVTITCKSSQSLLYSENKKNYLAWYQQKPGKVPKLLIFWASTRESGVPSRFSGSGSGTDFTLTISSLQPEDVATYYCQQYYNFPTFGQGTKLEIK

SEQ ID NO: 1396 - DNA, 336 bp, synthetic construct
  misc_feature 1..336: note = source = /note="Description of Artificial Sequence: Synthetic polynucleotide"
  source 1..336: mol_type = other DNA
gacattcagatgacccagtccccgagctcgctgtccgcctccgtgggagacagagtgacaatcacttgcaagagcagccagtcactgttgtactccgagaacaagaagaactacctcgcctggtaccagcagaagccgggaaaggtccctaagctgctgatcttctgggccagcactagggagtcgggagtgccgtcacggttcagcggatcgggatcgggtaccgacttcaccctgactatctcctccctgcaacctgaggacgtggccacctactactgtcagcagtactacaattttcccaccttcggccagggtaccaagctggaaatcaag

SEQ ID NO: 1397 - protein, 20 aa, synthetic construct
  REGION 1..20: note = source = /note="Description of Artificial Sequence: Synthetic peptide"
GGGGSGGGGSGGGGSGGGGS

SEQ ID NO: 1398 - protein, 251 aa, synthetic construct
  REGION 1..251: note = source = /note="Description of Artificial Sequence: Synthetic polypeptide"
QVQLVQSGAEVKKPGASVKVSCKASGFTFRDYYMAWVRQAPGQRLEWMGSISYEGNPYYGDSVKGRVTITRDNSASTLYMELSSLRSEDTAVYYCARHDHNNVDWFAYWGQGTLVTVSSGGGGSGGGGSGGGGSGGGGSDIQMTQSPSSLSASVGDRVTITCKSSQSLLYSENKKNYLAWYQQKPGKVPKLLIFWASTRESGVPSRFSGSGSGTDFTLTISSLQPEDVATYYCQQYYNFPTFGQGTKLEIK

SEQ ID NO: 1399 - protein, 119 aa, synthetic construct
  REGION 1..119: note = source = /note="Description of Artificial Sequence: Synthetic polypeptide"
EVQLVQSGAEVKKPGESLKISCKGSGFTFRDYYMAWVRQMPGKGLEWMGSISYEGNPYYGDSVKGQVTISRDNSISTLYLQWSSLKASDTAMYYCARHDHNNVDWFAYWGQGTLVTVSS

SEQ ID NO: 1400 - DNA, 357 bp, synthetic construct
  misc_feature 1..357: note = source = /note="Description of Artificial Sequence: Synthetic polynucleotide"
  source 1..357: mol_type = other DNA
gaagtccaactggtgcagtcaggagcagaagtcaaaaaaccaggagaaagcctcaagatcagctgcaagggctcgggtttcaccttccgggactactatatggcctgggtcagacagatgccgggaaagggactggaatggatggggtcaatcagctacgagggcaacccctactacggagactccgtgaagggacaggtcacaatctcccgggacaactcgatttccactctgtatctgcaatggagctccctcaaggcctccgacactgcgatgtactactgtgcgcggcatgaccacaacaatgtggattggttcgcctactggggacagggaaccctcgtgaccgtgtccagc

SEQ ID NO: 1401 - protein, 112 aa, synthetic construct; identical to SEQ ID NO: 1395
  REGION 1..112: note = source = /note="Description of Artificial Sequence: Synthetic polypeptide"

SEQ ID NO: 1402 - DNA, 336 bp, synthetic construct
  misc_feature 1..336: note = source = /note="Description of Artificial Sequence: Synthetic polynucleotide"
  source 1..336: mol_type = other DNA
gatatccaaatgacccagtcgccctcctcactctccgcctccgtgggagatcgcgtgaccattacttgcaagagctcgcagtccctgctgtactccgagaacaagaagaactacttggcctggtaccagcagaagcccggcaaagtgccgaagctgcttatcttttgggcctcgaccagggaaagcggagtgccgtcacgcttctccggctccgggtctggcaccgacttcactctgactatttcctccctgcaacctgaggacgtggctacctactactgccagcagtactacaacttccctaccttcggccaagggacgaagctggagatcaag

SEQ ID NO: 1403 - protein, 20 aa, synthetic construct
  REGION 1..20: note = source = /note="Description of Artificial Sequence: Synthetic peptide"
GGGGSGGGGSGGGGSGGGGS

SEQ ID NO: 1404 - protein, 251 aa, synthetic construct
  REGION 1..251: note = source = /note="Description of Artificial Sequence: Synthetic polypeptide"
EVQLVQSGAEVKKPGESLKISCKGSGFTFRDYYMAWVRQMPGKGLEWMGSISYEGNPYYGDSVKGQVTISRDNSISTLYLQWSSLKASDTAMYYCARHDHNNVDWFAYWGQGTLVTVSSGGGGSGGGGSGGGGSGGGGSDIQMTQSPSSLSASVGDRVTITCKSSQSLLYSENKKNYLAWYQQKPGKVPKLLIFWASTRESGVPSRFSGSGSGTDFTLTISSLQPEDVATYYCQQYYNFPTFGQGTKLEIK

SEQ ID NO: 1405 - protein, 119 aa, synthetic construct; identical to SEQ ID NO: 1399
  REGION 1..119: note = source = /note="Description of Artificial Sequence: Synthetic polypeptide"

SEQ ID NO: 1406 - DNA, 357 bp, synthetic construct
  misc_feature 1..357: note = source = /note="Description of Artificial Sequence: Synthetic polynucleotide"
  source 1..357: mol_type = other DNA
gaagtgcagttggtccaatcaggcgcagaagtgaagaaacccggagaatcattgaagatttcgtgcaaaggaagcgggttcacattccgcgattactacatggcgtgggtcagacagatgccgggaaagggactcgagtggatggggtccatcagctacgaaggaaacccttactacggggactccgtgaagggccaggtcaccatctcccgcgacaactcaatctccactctgtatctgcaatggtcgagcctcaaggcctctgatactgcgatgtactactgcgctcggcatgaccacaacaacgtggactggttcgcttactggggacagggtacccttgtgaccgtgtcctcc

SEQ ID NO: 1407 - protein, 112 aa, synthetic construct
  REGION 1..112: note = source = /note="Description of Artificial Sequence: Synthetic polypeptide"
EIVMTQSPATLSLSPGERATLSCKSSQSLLYSENKKNYLAWYQQKPGQAPRLLIFWASTRESGIPARFSGSGSGTDFTLTISSLQPEDLAVYYCQQYYNFPTFGQGTKLEIK

SEQ ID NO: 1408 - DNA, 336 bp, synthetic construct
  misc_feature 1..336: note = source = /note="Description of Artificial Sequence: Synthetic polynucleotide"
  source 1..336: mol_type = other DNA
gagatcgtgatgactcagtcccctgccaccctctcgctgtcccccggggagagggccacgctgtcctgcaagagctcccagtcactgctgtattccgaaaacaagaagaactacctcgcctggtaccaacagaagccgggacaggccccgcggcttctgatcttctgggcctccactcgggagtccggcattccggcccgcttctccggctcggggagcggaactgacttcaccctgaccatcagcagcctgcagccagaggacctcgcagtgtactactgtcaacagtactacaatttccccacctttggccagggtaccaagctggagattaag

SEQ ID NO: 1409 - protein, 20 aa, synthetic construct
  REGION 1..20: note = source = /note="Description of Artificial Sequence: Synthetic peptide"
GGGGSGGGGSGGGGSGGGGS

SEQ ID NO: 1410 - protein, 251 aa, synthetic construct
  REGION 1..251: note = source = /note="Description of Artificial Sequence: Synthetic polypeptide"
EVQLVQSGAEVKKPGESLKISCKGSGFTFRDYYMAWVRQMPGKGLEWMGSISYEGNPYYGDSVKGQVTISRDNSISTLYLQWSSLKASDTAMYYCARHDHNNVDWFAYWGQGTLVTVSSGGGGSGGGGSGGGGSGGGGSEIVMTQSPATLSLSPGERATLSCKSSQSLLYSENKKNYLAWYQQKPGQAPRLLIFWASTRESGIPARFSGSGSGTDFTLTISSLQPEDLAVYYCQQYYNFPTFGQGTKLEIK

SEQ ID NO: 1411 - protein, 5 aa, synthetic construct
  REGION 1..5: note = source = /note="Description of Artificial Sequence: Synthetic peptide"
DYAMH

SEQ ID NO: 1412 - protein, 17 aa, synthetic construct
  REGION 1..17: note = source = /note="Description of Artificial Sequence: Synthetic peptide"
TISWNSGSIGYADSVKG

SEQ ID NO: 1413 - protein, 13 aa, synthetic construct
  REGION 1..13: note = source = /note="Description of Artificial Sequence: Synthetic peptide"
DIQYGNYYYGMDV

SEQ ID NO: 1414 - protein, 7 aa, synthetic construct
  REGION 1..7: note = source = /note="Description of Artificial Sequence: Synthetic peptide"
GFTFNDY

SEQ ID NO: 1415 - protein, 6 aa, synthetic construct
  REGION 1..6: note = source = /note="Description of Artificial Sequence: Synthetic peptide"
SWNSGS

SEQ ID NO: 1416 - protein, 13 aa, synthetic construct
  REGION 1..13: note = source = /note="Description of Artificial Sequence: Synthetic peptide"
DIQYGNYYYGMDV

SEQ ID NO: 1417 - protein, 8 aa, synthetic construct
  REGION 1..8: note = source = /note="Description of Artificial Sequence: Synthetic peptide"
GFTFNDYA

SEQ ID NO: 1418 - protein, 8 aa, synthetic construct
  REGION 1..8: note = source = /note="Description of Artificial Sequence: Synthetic peptide"
ISWNSGSI

SEQ ID NO: 1419 - protein, 15 aa, synthetic construct
  REGION 1..15: note = source = /note="Description of Artificial Sequence: Synthetic peptide"
AKDIQYGNYYYGMDV

SEQ ID NO: 1420 - protein, 122 aa, synthetic construct
  REGION 1..122: note = source = /note="Description of Artificial Sequence: Synthetic polypeptide"
EVQLVESGGGLVQPGRSLRLSCAASGFTFNDYAMHWVRQAPGKGLEWVSTISWNSGSIGYADSVKGRFTISRDNAKKSLYLQMNSLRAEDTALYYCAKDIQYGNYYYGMDVWGQGTTVTVSS

SEQ ID NO: 1421 - DNA, 366 bp, synthetic construct
  misc_feature 1..366: note = source = /note="Description of Artificial Sequence: Synthetic polynucleotide"
  source 1..366: mol_type = other DNA
gaggtgcagctggtcgagtcggggggaggattggtgcagccgggcagaagcctgcggctctcatgtgccgcctccggcttcacctttaacgactacgcaatgcactgggtcagacaggctcctgggaagggcctggaatgggtgtccaccatttcctggaactccgggagcatcggctacgctgactccgtgaagggccgcttcacgattagccgcgataacgcgaaaaagagcctgtacctccaaatgaactccctgcgggccgaagataccgccctttactactgcgcgaaggacattcagtatggaaactactactacggaatggacgtctggggacaggggaccacagtgaccgtgtcaagc

SEQ ID NO: 1422 - protein, 11 aa, synthetic construct
  REGION 1..11: note = source = /note="Description of Artificial Sequence: Synthetic peptide"
RASQSVSSYLA

SEQ ID NO: 1423 - protein, 7 aa, synthetic construct
  REGION 1..7: note = source = /note="Description of Artificial Sequence: Synthetic peptide"
DASNRAT

SEQ ID NO: 1424 - protein, 9 aa, synthetic construct
  REGION 1..9: note = source = /note="Description of Artificial Sequence: Synthetic peptide"
QQRSNWPIT

SEQ ID NO: 1425 - protein, 7 aa, synthetic construct
  REGION 1..7: note = source = /note="Description of Artificial Sequence: Synthetic peptide"
SQSVSSY

SEQ ID NO: 1426 - skipped

SEQ ID NO: 1427 - protein, 6 aa, synthetic construct
  REGION 1..6: note = source = /note="Description of Artificial Sequence: Synthetic peptide"
RSNWPI

SEQ ID NO: 1428 - protein, 6 aa, synthetic construct
  REGION 1..6: note = source = /note="Description of Artificial Sequence: Synthetic peptide"
QSVSSY

SEQ ID NO: 1429 - skipped

SEQ ID NO: 1430 - protein, 9 aa, synthetic construct
  REGION 1..9: note = source = /note="Description of Artificial Sequence: Synthetic peptide"
QQRSNWPIT

SEQ ID NO: 1431 - protein, 107 aa, synthetic construct
  REGION 1..107: note = source = /note="Description of Artificial Sequence: Synthetic polypeptide"
EIVLTQSPATLSLSPGERATLSCRASQSVSSYLAWYQQKPGQAPRLLIYDASNRATGIPARFSGSGSGTDFTLTISSLEPEDFAVYYCQQRSNWPITFGQGTRLEIK

SEQ ID NO: 1432 - DNA, 321 bp, synthetic construct
  misc_feature 1..321: note = source = /note="Description of Artificial Sequence: Synthetic polynucleotide"
  source 1..321: mol_type = other DNA
gaaatcgtgctgacccagagcccagccactttgtcactgtcccccggcgaaagagccactctgtcctgccgggcatcgcagtccgtgtcgtcctacctggcctggtaccagcaaaagcccggacaagcccctcgccttctcatctacgacgcctccaatcgcgcgaccggaatcccggccaggttctccgggagcggttcaggcactgacttcaccctgaccatctcgtccctggagccggaggatttcgccgtgtattactgccagcagcggtccaactggcccatcaccttcggccaagggactcggctcgaaatcaag

SEQ ID NO: 1433 - protein, 20 aa, synthetic construct
  REGION 1..20: note = source = /note="Description of Artificial Sequence: Synthetic peptide"
GGGGSGGGGSGGGGSGGGGS

SEQ ID NO: 1434 - protein, 249 aa, synthetic construct
  REGION 1..249: note = source = /note="Description of Artificial Sequence: Synthetic polypeptide"
EVQLVESGGGLVQPGRSLRLSCAASGFTFNDYAMHWVRQAPGKGLEWVSTISWNSGSIGYADSVKGRFTISRDNAKKSLYLQMNSLRAEDTALYYCAKDIQYGNYYYGMDVWGQGTTVTVSSGGGGSGGGGSGGGGSGGGGSEIVLTQSPATLSLSPGERATLSCRASQSVSSYLAWYQQKPGQAPRLLIYDASNRATGIPARFSGSGSGTDFTLTISSLEPEDFAVYYCQQRSNWPITFGQGTRLEIK

SEQ ID NO: 1435 - DNA, 747 bp, synthetic construct
  misc_feature 1..747: note = source = /note="Description of Artificial Sequence: Synthetic polynucleotide"
  source 1..747: mol_type = other DNA
gaggtgcagctggtcgagtcggggggaggattggtgcagccgggcagaagcctgcggctctcatgtgccgcctccggcttcacctttaacgactacgcaatgcactgggtcagacaggctcctgggaagggcctggaatgggtgtccaccatttcctggaactccgggagcatcggctacgctgactccgtgaagggccgcttcacgattagccgcgataacgcgaaaaagagcctgtacctccaaatgaactccctgcgggccgaagataccgccctttactactgcgcgaaggacattcagtatggaaactactactacggaatggacgtctggggacaggggaccacagtgaccgtgtcaagcggcggtggaggatctggcggaggaggttccggtggcggtggatcgggagggggaggatcggaaatcgtgctgacccagagcccagccactttgtcactgtcccccggcgaaagagccactctgtcctgccgggcatcgcagtccgtgtcgtcctacctggcctggtaccagcaaaagcccggacaagcccctcgccttctcatctacgacgcctccaatcgcgcgaccggaatcccggccaggttctccgggagcggttcaggcactgacttcaccctgaccatctcgtccctggagccggaggatttcgccgtgtattactgccagcagcggtccaactggcccatcaccttcggccaagggactcggctcgaaatcaag

SEQ ID NO: 1436 - protein, 119 aa, synthetic construct
  REGION 1..119: note = source = /note="Description of Artificial Sequence: Synthetic polypeptide"
EVQLVESGGGLVQPGRSLKLSCAASGFTFRDYYMAWVRQAPKKGLEWVASISYEGNPYYGDSVKGRFTISRNNAKSTLYLQMNSLRSEDTATYYCARHDHNNVDWFAYWGQGTLVTVSS

SEQ ID NO: 1437 - protein, 112 aa, synthetic construct
  REGION 1..112: note = source = /note="Description of Artificial Sequence: Synthetic polypeptide"
DIVMTQTPSSQAVSAGEKVTMSCKSSQSLLYSENKKNYLAWYQQKPGQSPKLLIFWASTRESGVPDRFIGSGSGTDFTLTISSVQAEDLAVYYCQQYYNFPTFGSGTKLEIK

SEQ ID NO: 1438 - protein, 20 aa, synthetic construct
  REGION 1..20: note = source = /note="Description of Artificial Sequence: Synthetic peptide"
GGGGSGGGGSGGGGSGGGGS

SEQ ID NO: 1439 - protein, 251 aa, synthetic construct
  REGION 1..251: note = source = /note="Description of Artificial Sequence: Synthetic polypeptide"
EVQLVESGGGLVQPGRSLKLSCAASGFTFRDYYMAWVRQAPKKGLEWVASISYEGNPYYGDSVKGRFTISRNNAKSTLYLQMNSLRSEDTATYYCARHDHNNVDWFAYWGQGTLVTVSSGGGGSGGGGSGGGGSGGGGSDIVMTQTPSSQAVSAGEKVTMSCKSSQSLLYSENKKNYLAWYQQKPGQSPKLLIFWASTRESGVPDRFIGSGSGTDFTLTISSVQAEDLAVYYCQQYYNFPTFGSGTKLEIK

SEQ ID NO: 1440 - protein, 122 aa, synthetic construct
  REGION 1..122: note = source = /note="Description of Artificial Sequence: Synthetic polypeptide"
EVQLQQSGAELVKPGASVKMSCKASGYTFTSYNMHWVKQTPGQGLEWIGAIYPGNGDTSYNQKFKGKATLTADKSSSTAYMQLSSLTSEDSADYYCARSNYYGSSYWFFDVWGAGTTVTVSS

SEQ ID NO: 1441 - DNA, 366 bp, synthetic construct
  misc_feature 1..366: note = source = /note="Description of Artificial Sequence: Synthetic polynucleotide"
  source 1..366: mol_type = other DNA
gaggtgcaactgcagcagtcaggagcagaactggtcaagccgggcgcatccgtcaagatgagctgcaaggcctcaggatacaccttcacttcatacaacatgcactgggtcaagcagacgcctgggcaggggctggagtggatcggtgccatctaccccggaaacggcgacacctcctacaaccagaagttcaagggaaaggccaccctcaccgctgataagtccagcagcaccgcctacatgcaactgtcgtccctgacttcggaggacagcgctgactactattgcgcccgctctaattactacggttcctcctactggttcttcgacgtgtggggcgcgggtaccactgtgactgtctccagc

SEQ ID NO: 1442 - protein, 106 aa, synthetic construct
  REGION 1..106: note = source = /note="Description of Artificial Sequence: Synthetic polypeptide"
DIVLTQSPAILSASPGEKVTMTCRASSSVNYMDWYQKKPGSSPKPWIYATSNLASGVPARFSGSGSGTSYSLTISRVEAEDAATYYCQQWSFNPPTFGGGTKLEIK

SEQ ID NO: 1443 - DNA, 318 bp, synthetic construct
  misc_feature 1..318: note = source = /note="Description of Artificial Sequence: Synthetic polynucleotide"
  source 1..318: mol_type = other DNA
gacatcgtgctcactcagtcgcccgccattctgagcgctagccccggcgaaaaggtcaccatgacctgtagagcgtcatcctcggtgaactacatggactggtaccagaagaagccgggatcgagccctaagccatggatctacgccacatccaatctggcgtccggcgtgccggcccggttcagcgggagcggctcaggcacctcctattccctcaccatctcgagagtggaggctgaggatgcagccacgtactactgtcagcagtggtcgttcaaccccccaacctttggtggtggaaccaagctggaaatcaag

SEQ ID NO: 1444 - protein, 18 aa, synthetic construct
  REGION 1..18: note = source = /note="Description of Artificial Sequence: Synthetic peptide"
GSTSGGGSGGGSGGGGSS

SEQ ID NO: 1445 - protein, 246 aa, synthetic construct
  REGION 1..246: note = source = /note="Description of Artificial Sequence: Synthetic polypeptide"
DIVLTQSPAILSASPGEKVTMTCRASSSVNYMDWYQKKPGSSPKPWIYATSNLASGVPARFSGSGSGTSYSLTISRVEAEDAATYYCQQWSFNPPTFGGGTKLEIKGSTSGGGSGGGSGGGGSSEVQLQQSGAELVKPGASVKMSCKASGYTFTSYNMHWVKQTPGQGLEWIGAIYPGNGDTSYNQKFKGKATLTADKSSSTAYMQLSSLTSEDSADYYCARSNYYGSSYWFFDVWGAGTTVTVSS

SEQ ID NO: 1446 - DNA, 738 bp, synthetic construct
  misc_feature 1..738: note = source = /note="Description of Artificial Sequence: Synthetic polynucleotide"
  source 1..738: mol_type = other DNA
gacatcgtgctcactcagtcgcccgccattctgagcgctagccccggcgaaaaggtcaccatgacctgtagagcgtcatcctcggtgaactacatggactggtaccagaagaagccgggatcgagccctaagccatggatctacgccacatccaatctggcgtccggcgtgccggcccggttcagcgggagcggctcaggcacctcctattccctcaccatctcgagagtggaggctgaggatgcagccacgtactactgtcagcagtggtcgttcaaccccccaacctttggtggtggaaccaagctggaaatcaagggaagcacctccggcggaggttccggaggagggtccggaggcggaggcagctccgaggtgcaactgcagcagtcaggagcagaactggtcaagccgggcgcatccgtcaagatgagctgcaaggcctcaggatacaccttcacttcatacaacatgcactgggtcaagcagacgcctgggcaggggctggagtggatcggtgccatctaccccggaaacggcgacacctcctacaaccagaagttcaagggaaaggccaccctcaccgctgataagtccagcagcaccgcctacatgcaactgtcgtccctgacttcggaggacagcgctgactactattgcgcccgctctaattactacggttcctcctactggttcttcgacgtgtggggcgcgggtaccactgtgactgtctccagc

SEQ ID NO: 1447 - protein, 243 aa, synthetic construct
  REGION 1..243: note = source = /note="Description of Artificial Sequence: Synthetic polypeptide"
EVQLQQSGPGLVKPSQTLSLTCAISGDSMLSNSDTWNWIRQSPSRGLEWLGRTYHRSTWYDDYASSVRGRVSINVDTSKNQYSLQLNAVTPEDTGVYYCARVRLQDGNSWSDAFDVWGQGTMVTVSSGGGGSQSALTQPASASGSPGQSVTISCTGTSSDVGGYNYVSWYQQHPGKAPKLMIYDVSNRPSGVSNRFSGSKSGNTASLTISGLQAEDEADYYCSSYTSSSTLYVFGTGTQLTVL

SEQ ID NO: 1448 - protein, 253 aa, synthetic construct
  REGION 1..253: note = source = /note="Description of Artificial Sequence: Synthetic polypeptide"
QSALTQPASASGSPGQSVTISCTGTSSDVGGYNYVSWYQQHPGKAPKLMIYDVSNRPSGVSNRFSGSKSGNTASLTISGLQAEDEADYYCSSYTSSSTLYVFGTGTQLTVLGGGGSGGGGSGGGGSEVQLQQSGPGLVKPSQTLSLTCAISGDSMLSNSDTWNWIRQSPSRGLEWLGRTYHRSTWYDDYASSVRGRVSINVDTSKNQYSLQLNAVTPEDTGVYYCARVRLQDGNSWSDAFDVWGQGTMVTVSS

SEQ ID NO: 1449 - protein, 243 aa, synthetic construct
  REGION 1..243: note = source = /note="Description of Artificial Sequence: Synthetic polypeptide"
QSALTQPASASGSPGQSVTISCTGTSSDVGGYNYVSWYQQHPGKAPKLMIYDVSNRPSGVSNRFSGSKSGNTASLTISGLQAEDEADYYCSSYTSSSTLYVFGTGTQLTVLGGGGSEVQLQQSGPGLVKPSQTLSLTCAISGDSMLSNSDTWNWIRQSPSRGLEWLGRTYHRSTWYDDYASSVRGRVSINVDTSKNQYSLQLNAVTPEDTGVYYCARVRLQDGNSWSDAFDVWGQGTMVTVSS

SEQ ID NO: 1450 - protein, 559 aa, synthetic construct
  REGION 1..559: note = source = /note="Description of Artificial Sequence: Synthetic polypeptide"
MALPVTALLLPLALLLHAARPEVQLVESGGGLVQPGGSLRLSCAVSGFALSNHGMSWVRRAPGKGLEWVSGIVYSGSTYYAASVKGRFTISRDNSRNTLYLQMNSLRPEDTAIYYCSAHGGESDVWGQGTTVTVSSASGGGGSGGRASGGGGSDIQLTQSPSSLSASVGDRVTITCRASQSISSYLNWYQQKPGKAPKLLIYAASSLQSGVPSRFSGSGSGTDFTLTISSLQPEDFATYYCQQSYSTPYTFGQGTKVEIKTTTPAPRPPTPAPTIASQPLSLRPEACRPAAGGAVHTRGLDFACDIYIWAPLAGTCGVLLLSLVITLYCKRGRKKLLYIFKQPFMRPVQTTQEEDGCSCRFPEEEEGGCELRVKFSRSADAPAYQQGQNQLYNELNLGRREEYDVLDKRRGRDPEMGGKPRRKNPQEGLYNELQKDKMAEAYSEIGMKGERRRGKGHDGLYQGLSTATKDTYDALHMQALPPRGGGGSGGGGTGGGGSGMHKRSHTGERPFQCNQCGASFTQKGNLLRHIKLHTGEKPFKCHLCNTASAEARHIKAEMG

SEQ ID NO: 1451 - protein, 246 aa, synthetic construct
  REGION 1..246: note = source = /note="Description of Artificial Sequence: Synthetic polypeptide"
EIQLVQSGAEVKKPGATVKISCKGSGFNIEDYYIHWVQQAPGKGLEWMGRIDPENDETKYGPIFQGRVTITADTSTNTVYMELSSLRSEDTAVYYCAFRGGVYWGQGTTVTVSSGGGGSGGGGSGGGGSGGGGSDVVMTQSPDSLAVSLGERATINCKSSQSLLDSDGKTYLNWLQQKPGQPPKRLISLVSKLDSGVPDRFSGSGSGTDFTLTISSLQAEDVAVYYCWQGTHFPGTFGGGTKVEIK

SEQ ID NO: 1452 - DNA, 738 bp, synthetic construct
  misc_feature 1..738: note = source = /note="Description of Artificial Sequence: Synthetic polynucleotide"
  source 1..738: mol_type = other DNA
gaaatccagctggtccaatcgggagctgaggtcaagaagccgggagccaccgtcaagatctcatgcaaggggtcgggattcaacatcgaggactactacattcactgggtgcagcaagctccgggaaaaggcctggaatggatgggcagaatcgacccagaaaacgacgaaactaagtacggaccgattttccaaggaagagtgactatcaccgccgatacttcaaccaataccgtctacatggaactgagctcgctccggtccgaagatactgcagtgtattactgtgcctttcgcggaggggtgtactggggccaaggaactactgtcactgtctcgtcaggaggcggagggtcgggaggaggcgggagcggaggcggtggctcgggtggcggaggaagcgacgtggtgatgacccagtccccggactccctcgccgtgagcctcggagagagggcgactatcaattgcaagtcgtcccagtcacttctggattccgatggtaaaacgtacctcaactggctgcagcaaaagccagggcagccacccaaacggttgatctcccttgtgtccaaactggatagcggagtgcctgaccgcttctcgggttccggtagcgggaccgacttcaccctgacgatcagctcactgcaggcggaggacgtggcagtgtactactgctggcagggaacccacttccctggcacctttggaggtggcaccaaggtggagatcaag

SEQ ID NO: 1453 - DNA, 831 bp, synthetic construct
  misc_feature 1..831: note = source = /note="Description of Artificial Sequence: Synthetic polynucleotide"
  source 1..831: mol_type = other DNA
atggccctccctgtcaccgccctgctgcttccgctggctcttctgctccacgccgctcggcccgaaatccagctggtccaatcgggagctgaggtcaagaagccgggagccaccgtcaagatctcatgcaaggggtcgggattcaacatcgaggactactacattcactgggtgcagcaagctccgggaaaaggcctggaatggatgggcagaatcgacccagaaaacgacgaaactaagtacggaccgattttccaaggaagagtgactatcaccgccgatacttcaaccaataccgtctacatggaactgagctcgctccggtccgaagatactgcagtgtattactgtgcctttcgcggaggggtgtactggggccaaggaactactgtcactgtctcgtcaggaggcggagggtcgggaggaggcgggagcggaggcggtggctcgggtggcggaggaagcgacgtggtgatgacccagtccccggactccctcgccgtgagcctcggagagagggcgactatcaattgcaagtcgtcccagtcacttctggattccgatggtaaaacgtacctcaactggctgcagcaaaagccagggcagccacccaaacggttgatctcccttgtgtccaaactggatagcggagtgcctgaccgcttctcgggttccggtagcgggaccgacttcaccctgacgatcagctcactgcaggcggaggacgtggcagtgtactactgctggcagggaacccacttccctggcacctttggaggtggcaccaaggtggagatcaagggatcgcaccaccatcaccatcatcatcac

SEQ ID NO: 1454 - protein, 277 aa, synthetic construct
  REGION 1..277: note = source = /note="Description of Artificial Sequence: Synthetic polypeptide"
MALPVTALLLPLALLLHAARPEIQLVQSGAEVKKPGATVKISCKGSGFNIEDYYIHWVQQAPGKGLEWMGRIDPENDETKYGPIFQGRVTITADTSTNTVYMELSSLRSEDTAVYYCAFRGGVYWGQGTTVTVSSGGGGSGGGGSGGGGSGGGGSDVVMTQSPDSLAVSLGERATINCKSSQSLLDSDGKTYLNWLQQKPGQPPKRLISLVSKLDSGVPDRFSGSGSGTDFTLTISSLQAEDVAVYYCWQGTHFPGTFGGGTKVEIKGSHHHHHHHH

SEQ ID NO: 1455 - DNA, 1470 bp, synthetic construct
  misc_feature 1..1470: note = source = /note="Description of Artificial Sequence: Synthetic polynucleotide"
  source 1..1470: mol_type = other DNA
atggccctccctgtcaccgccctgctgcttccgctggctcttctgctccacgccgctcggcccgagatccagctggtgcagtcgggagctgaagtcaaaaagcctggcgcaaccgtcaagatctcgtgcaaaggatcagggttcaacatcgaggactactacatccattgggtgcaacaggcacccggaaaaggcctggagtggatggggaggattgacccagaaaatgacgaaaccaagtacggaccgatcttccaaggacgggtgaccatcacggctgacacttccactaacaccgtctacatggaactctcgagccttcgctcggaagataccgcggtgtactactgcgcctttagaggtggagtctactggggacaagggactaccgtcaccgtgtcgtcaggtggcggaggatcaggcggaggcggctccggtggaggaggaagcggaggaggtggctccgacgtggtgatgacgcagtcaccggactccttggcggtgagcctgggtgaacgcgccactatcaactgcaagagctcccagagcttgctggactccgatggaaagacttatctcaattggctgcaacagaagcctggccagccgccaaagagactcatctcactggtgagcaagctggatagcggagtgccagatcggttttcgggatcgggctcaggcaccgacttcaccctgactatttcctccctccaagccgaggatgtggccgtctactactgttggcaggggactcacttcccggggaccttcggtggaggcactaaggtggagatcaaaaccactaccccagcaccgaggccacccaccccggctcctaccatcgcctcccagcctctgtccctgcgtccggaggcatgtagacccgcagctggtggggccgtgcatacccggggtcttgacttcgcctgcgatatctacatttgggcccctctggctggtacttgcggggtcctgctgctttcactcgtgatcactctttactgtaagcgcggtcggaagaagctgctgtacatctttaagcaacccttcatgaggcctgtgcagactactcaagaggaggacggctgttcatgccggttcccagaggaggaggaaggcggctgcgaactgcgcgtgaaattcagccgcagcgcagatgctccagcctacaagcaggggcagaaccagctctacaacgaactcaatcttggtcggagagaggagtacgacgtgctggacaagcggagaggacgggacccagaaatgggcgggaagccgcgcagaaagaatccccaagagggcctgtacaacgagctccaaaaggataagatggcagaagcctatagcgagattggtatgaaaggggaacgcagaagaggcaaaggccacgacggactgtaccagggactcagcaccgccaccaaggacacctatgacgctcttcacatgcaggccctgccgcctcgg

SEQ ID NO: 1456 - protein, 490 aa, synthetic construct
  REGION 1..490: note = source = /note="Description of Artificial Sequence: Synthetic polypeptide"
MALPVTALLLPLALLLHAARPEIQLVQSGAEVKKPGATVKISCKGSGFNIEDYYIHWVQQAPGKGLEWMGRIDPENDETKYGPIFQGRVTITADTSTNTVYMELSSLRSEDTAVYYCAFRGGVYWGQGTTVTVSSGGGGSGGGGSGGGGSGGGGSDVVMTQSPDSLAVSLGERATINCKSSQSLLDSDGKTYLNWLQQKPGQPPKRLISLVSKLDSGVPDRFSGSGSGTDFTLTISSLQAEDVAVYYCWQGTHFPGTFGGGTKVEIKTTTPAPRPPTPAPTIASQPLSLRPEACRPAAGGAVHTRGLDFACDIYIWAPLAGTCGVLLLSLVITLYCKRGRKKLLYIFKQPFMRPVQTTQEEDGCSCRFPEEEEGGCELRVKFSRSADAPAYKQGQNQLYNELNLGRREEYDVLDKRRGRDPEMGGKPRRKNPQEGLYNELQKDKMAEAYSEIGMKGERRRGKGHDGLYQGLSTATKDTYDALHMQALPPR

SEQ ID NO: 1457 - protein, 246 aa, synthetic construct
  REGION 1..246: note = source = /note="Description of Artificial Sequence: Synthetic polypeptide"
DVVMTQSPDSLAVSLGERATINCKSSQSLLDSDGKTYLNWLQQKPGQPPKRLISLVSKLDSGVPDRFSGSGSGTDFTLTISSLQAEDVAVYYCWQGTHFPGTFGGGTKVEIKGGGGSGGGGSGGGGSGGGGSEIQLVQSGAEVKKPGATVKISCKGSGFNIEDYYIHWVQQAPGKGLEWMGRIDPENDETKYGPIFQGRVTITADTSTNTVYMELSSLRSEDTAVYYCAFRGGVYWGQGTTVTVSS

SEQ ID NO: 1458 - DNA, 738 bp, synthetic construct
  misc_feature 1..738: note = source = /note="Description of Artificial Sequence: Synthetic polynucleotide"
  source 1..738: mol_type = other DNA
gatgtcgtgatgacccagtccccagactccctcgcagtgtccttgggagaacgggccaccatcaactgcaaatcgagccagtcactgctggactcagacggaaagacctacctcaactggctgcagcagaagcctggccagccaccgaagcgcctgatctccctggtgtccaagctggactcgggcgtcccggacaggtttagcggtagcggctcgggaaccgacttcactctgaccattagctcgctccaagctgaagatgtggcggtctactactgctggcaggggacccacttccccgggacctttggcggaggaactaaagtcgaaatcaaaggaggaggcggatcaggtggaggaggcagcggaggaggagggagcggcggtggcggctccgaaattcaacttgtgcaatccggtgccgaggtgaagaaacctggtgccactgtcaagatctcgtgtaagggatcgggattcaatatcgaggactactacatccactgggtgcaacaggcgccaggaaagggattggagtggatgggtcgcatcgacccggaaaacgatgagactaagtacggaccgatcttccaaggccgggtcacgatcactgcggatacctccactaataccgtgtatatggagctctcgtcactgagaagcgaagatacggccgtgtactactgcgcattcagaggaggtgtgtactggggccagggaactactgtgaccgtgtcgtcg

SEQ ID NO: 1459 - DNA, 831 bp, synthetic construct
  misc_feature 1..831: note = source = /note="Description of Artificial Sequence: Synthetic polynucleotide"
  source 1..831: mol_type = other DNA
atggccctccctgtcaccgccctgctgcttccgctggctcttctgctccacgccgctcggcccgatgtcgtgatgacccagtccccagactccctcgcagtgtccttgggagaacgggccaccatcaactgcaaatcgagccagtcactgctggactcagacggaaagacctacctcaactggctgcagcagaagcctggccagccaccgaagcgcctgatctccctggtgtccaagctggactcgggcgtcccggacaggtttagcggtagcggctcgggaaccgacttcactctgaccattagctcgctccaagctgaagatgtggcggtctactactgctggcaggggacccacttccccgggacctttggcggaggaactaaagtcgaaatcaaaggaggaggcggatcaggtggaggaggcagcggaggaggagggagcggcggtggcggctccgaaattcaacttgtgcaatccggtgccgaggtgaagaaacctggtgccactgtcaagatctcgtgtaagggatcgggattcaatatcgaggactactacatccactgggtgcaacaggcgccaggaaagggattggagtggatgggtcgcatcgacccggaaaacgatgagactaagtacggaccgatcttccaaggccgggtcacgatcactgcggatacctccactaataccgtgtatatggagctctcgtcactgagaagcgaagatacggccgtgtactactgcgcattcagaggaggtgtgtactggggccagggaactactgtgaccgtgtcgtcggggtcacatcaccaccatcatcatcaccac

SEQ ID NO: 1460 - protein, 277 aa, synthetic construct
  REGION 1..277: note = source = /note="Description of Artificial Sequence: Synthetic polypeptide"
MALPVTALLLPLALLLHAARPDVVMTQSPDSLAVSLGERATINCKSSQSLLDSDGKTYLNWLQQKPGQPPKRLISLVSKLDSGVPDRFSGSGSGTDFTLTISSLQAEDVAVYYCWQGTHFPGTFGGGTKVEIKGGGGSGGGGSGGGGSGGGGSEIQLVQSGAEVKKPGATVKISCKGSGFNIEDYYIHWVQQAPGKGLEWMGRIDPENDETKYGPIFQGRVTITADTSTNTVYMELSSLRSEDTAVYYCAFRGGVYWGQGTTVTVSSGSHHHHHHHH

SEQ ID NO: 1461 - DNA, 1470 bp, synthetic construct
  misc_feature 1..1470: note = source = /note="Description of Artificial Sequence: Synthetic polynucleotide"
  source 1..1470: mol_type = other DNA
atggccctccctgtcaccgccctgctgcttccgctggctcttctgctccacgccgctcggcccgacgtggtcatgactcaaagcccagattccttggctgtctcccttggagaaagagcaacgatcaattgcaaaagctcgcagtccctgttggactccgatggaaaaacctacctcaactggctgcagcagaagccgggacaaccaccaaagcggctgatttccctcgtgtccaagctggacagcggcgtgccggatcgcttctcgggcagcggctcgggaaccgattttactctcactatttcgtcactgcaagcggaggacgtggcggtgtattactgctggcagggcactcacttcccgggtacttttggtggaggtaccaaagtcgaaatcaagggtggaggcgggagcggaggaggcgggtcgggaggaggaggatcgggtggcggaggctcagaaatccagctggtgcagtcaggtgccgaagtgaagaagcctggggccacggtgaagatctcgtgcaaggggagcggattcaacatcgaggattactacatccattgggtgcaacaggcccctggcaaagggctggaatggatgggaaggatcgaccccgagaatgacgagactaagtacggcccgatcttccaaggacgggtgaccatcactgcagacacttcaaccaacaccgtctacatggaactctcctcgctgcgctccgaggacaccgccgtgtactactgtgctttcagaggaggagtctactggggacagggaacgaccgtgaccgtcagctcaaccactaccccagcaccgaggccacccaccccggctcctaccatcgcctcccagcctctgtccctgcgtccggaggcatgtagacccgcagctggtggggccgtgcatacccggggtcttgacttcgcctgcgatatctacatttgggcccctctggctggtacttgcggggtcctgctgctttcactcgtgatcactctttactgtaagcgcggtcggaagaagctgctgtacatctttaagcaacccttcatgaggcctgtgcagactactcaagaggaggacggctgttcatgccggttcccagaggaggaggaaggcggctgcgaactgcgcgtgaaattcagccgcagcgcagatgctccagcctacaagcaggggcagaaccagctctacaacgaactcaatcttggtcggagagaggagtacgacgtgctggacaagcggagaggacgggacccagaaatgggcgggaagccgcgcagaaagaatccccaagagggcctgtacaacgagctccaaaaggataagatggcagaagcctatagcgagattggtatgaaaggggaacgcagaagaggcaaaggccacgacggactgtaccagggactcagcaccgccaccaaggacacctatgacgctcttcacatgcaggccctgccgcctcgg

SEQ ID NO: 1462 - protein, 490 aa, synthetic construct
  REGION 1..490: note = source = /note="Description of Artificial Sequence: Synthetic polypeptide"
MALPVTALLLPLALLLHAARPDVVMTQSPDSLAVSLGERATINCKSSQSLLDSDGKTYLNWLQQKPGQPPKRLISLVSKLDSGVPDRFSGSGSGTDFTLTISSLQAEDVAVYYCWQGTHFPGTFGGGTKVEIKGGGGSGGGGSGGGGSGGGGSEIQLVQSGAEVKKPGATVKISCKGSGFNIEDYYIHWVQQAPGKGLEWMGRIDPENDETKYGPIFQGRVTITADTSTNTVYMELSSLRSEDTAVYYCAFRGGVYWGQGTTVTVSSTTTPAPRPPTPAPTIASQPLSLRPEACRPAAGGAVHTRGLDFACDIYIWAPLAGTCGVLLLSLVITLYCKRGRKKLLYIFKQPFMRPVQTTQEEDGCSCRFPEEEEGGCELRVKFSRSADAPAYKQGQNQLYNELNLGRREEYDVLDKRRGRDPEMGGKPRRKNPQEGLYNELQKDKMAEAYSEIGMKGERRRGKGHDGLYQGLSTATKDTYDALHMQALPPR

SEQ ID NO: 1463 - protein, 246 aa, synthetic construct
  REGION 1..246: note = source = /note="Description of Artificial Sequence: Synthetic polypeptide"
EIQLVQSGAEVKKPGESLRISCKGSGFNIEDYYIHWVRQMPGKGLEWMGRIDPENDETKYGPIFQGHVTISADTSINTVYLQWSSLKASDTAMYYCAFRGGVYWGQGTTVTVSSGGGGSGGGGSGGGGSGGGGSDVVMTQSPLSLPVTLGQPASISCKSSQSLLDSDGKTYLNWLQQRPGQSPRRLISLVSKLDSGVPDRFSGSGSGTDFTLKISRVEAEDVGVYYCWQGTHFPGTFGGGTKVEIK

SEQ ID NO: 1464 - DNA, 738 bp, synthetic construct
  misc_feature 1..738: note = source = /note="Description of Artificial Sequence: Synthetic polynucleotide"
  source 1..738: mol_type = other DNA
gagattcagctggtccaaagcggcgcagaagtgaaaaagccaggggaatcgttgcgcatcagctgtaaaggttccggcttcaacatcgaggactattacatccattgggtgcggcagatgccaggaaaggggctggaatggatgggacggattgacccggagaacgacgaaaccaagtacggaccgatctttcaaggacacgtgactatctccgccgacaccagcatcaatacggtgtacctccaatggtcctcactcaaggcctcggataccgcgatgtactactgcgcgttcagaggaggcgtctactggggacaagggactactgtgactgtctcatcaggaggtggaggaagcggaggaggtggctcgggcggaggtggatcgggaggaggagggtccgatgtggtgatgacccagtccccactgtcgctcccggtgaccctcggacagcctgctagcatctcgtgcaaatcctcgcaatccctgctggactcggacggaaaaacgtacctcaattggctgcagcagcgccctggccagagcccgagaaggcttatctcgctggtgtcaaagctggatagcggtgtgcccgaccggttcagcggctcagggtcaggaaccgatttcaccttgaagatctcccgcgtggaagccgaagatgtcggagtctactactgctggcagggtactcacttcccggggacctttggtggcggcactaaggtcgagattaag

SEQ ID NO: 1465 - DNA, 831 bp, synthetic construct
  misc_feature 1..831: note = source = /note="Description of Artificial Sequence: Synthetic polynucleotide"
  source 1..831: mol_type = other DNA
atggccctccctgtcaccgccctgctgcttccgctggctcttctgctccacgccgctcggcccgagattcagctggtccaaagcggcgcagaagtgaaaaagccaggggaatcgttgcgcatcagctgtaaaggttccggcttcaacatcgaggactattacatccattgggtgcggcagatgccaggaaaggggctggaatggatgggacggattgacccggagaacgacgaaaccaagtacggaccgatctttcaaggacacgtgactatctccgccgacaccagcatcaatacggtgtacctccaatggtcctcactcaaggcctcggataccgcgatgtactactgcgcgttcagaggaggcgtctactggggacaagggactactgtgactgtctcatcaggaggtggaggaagcggaggaggtggctcgggcggaggtggatcgggaggaggagggtccgatgtggtgatgacccagtccccactgtcgctcccggtgaccctcggacagcctgctagcatctcgtgcaaatcctcgcaatccctgctggactcggacggaaaaacgtacctcaattggctgcagcagcgccctggccagagcccgagaaggcttatctcgctggtgtcaaagctggatagcggtgtgcccgaccggttcagcggctcagggtcaggaaccgatttcaccttgaagatctcccgcgtggaagccgaagatgtcggagtctactactgctggcagggtactcacttcccggggacctttggtggcggcactaaggtcgagattaagggctcacaccatcatcaccatcaccaccac

SEQ ID NO: 1466 - protein, 277 aa, synthetic construct
  REGION 1..277: note = source = /note="Description of Artificial Sequence: Synthetic polypeptide"
MALPVTALLLPLALLLHAARPEIQLVQSGAEVKKPGESLRISCKGSGFNIEDYYIHWVRQMPGKGLEWMGRIDPENDETKYGPIFQGHVTISADTSINTVYLQWSSLKASDTAMYYCAFRGGVYWGQGTTVTVSSGGGGSGGGGSGGGGSGGGGSDVVMTQSPLSLPVTLGQPASISCKSSQSLLDSDGKTYLNWLQQRPGQSPRRLISLVSKLDSGVPDRFSGSGSGTDFTLKISRVEAEDVGVYYCWQGTHFPGTFGGGTKVEIKGSHHHHHHHH

SEQ ID NO: 1467 - DNA, 1470 bp, synthetic construct
  misc_feature 1..1470: note = source = /note="Description of Artificial Sequence: Synthetic polynucleotide"
  source 1..1470: mol_type = other DNA
atggccctccctgtcaccgccctgctgcttccgctggctcttctgctccacgccgctcggcccgaaatccagctggtgcaaagcggagccgaggtgaagaagcccggagaatccctgcgcatctcgtgtaagggttccggctttaacatcgaggattactacatccactgggtgagacagatgccgggcaaaggtctggaatggatgggccgcatcgacccggagaacgacgaaaccaaatacggaccaatcttccaaggacatgtgactatttccgcggatacctccatcaacactgtctacttgcagtggagctcgctcaaggcgtcggataccgccatgtactactgcgcattcagaggaggtgtgtactggggccagggcactacggtcaccgtgtcctcgggaggtggagggtcaggaggcggaggctcgggcggtggaggatcaggcggaggaggaagcgatgtggtcatgactcaatccccactgtcactgcctgtcactctggggcaaccggcttccatctcatgcaagtcaagccaatcgctgctcgactccgacggaaaaacctacctcaattggcttcagcagcgcccaggccagtcgcctcggaggctgatctcactcgtgtcgaagcttgactccggggtgccggatcggtttagcggaagcggatcggggaccgacttcacgttgaagattagccgggtggaagccgaggacgtgggagtctattactgctggcaggggacccacttcccggggactttcggaggaggcaccaaagtcgagattaagaccactaccccagcaccgaggccacccaccccggctcctaccatcgcctcccagcctctgtccctgcgtccggaggcatgtagacccgcagctggtggggccgtgcatacccggggtcttgacttcgcctgcgatatctacatttgggcccctctggctggtacttgcggggtcctgctgctttcactcgtgatcactctttactgtaagcgcggtcggaagaagctgctgtacatctttaagcaacccttcatgaggcctgtgcagactactcaagaggaggacggctgttcatgccggttcccagaggaggaggaaggcggctgcgaactgcgcgtgaaattcagccgcagcgcagatgctccagcctacaagcaggggcagaaccagctctacaacgaactcaatcttggtcggagagaggagtacgacgtgctggacaagcggagaggacgggacccagaaatgggcgggaagccgcgcagaaagaatccccaagagggcctgtacaacgagctccaaaaggataagatggcagaagcctatagcgagattggtatgaaaggggaacgcagaagaggcaaaggccacgacggactgtaccagggactcagcaccgccaccaaggacacctatgacgctcttcacatgcaggccctgccgcctcgg

SEQ ID NO: 1468 - protein, 490 aa, synthetic construct
  REGION 1..490: note = source = /note="Description of Artificial Sequence: Synthetic polypeptide"
MALPVTALLLPLALLLHAARPEIQLVQSGAEVKKPGESLRISCKGSGFNIEDYYIHWVRQMPGKGLEWMGRIDPENDETKYGPIFQGHVTISADTSINTVYLQWSSLKASDTAMYYCAFRGGVYWGQGTTVTVSSGGGGSGGGGSGGGGSGGGGSDVVMTQSPLSLPVTLGQPASISCKSSQSLLDSDGKTYLNWLQQRPGQSPRRLISLVSKLDSGVPDRFSGSGSGTDFTLKISRVEAEDVGVYYCWQGTHFPGTFGGGTKVEIKTTTPAPRPPTPAPTIASQPLSLRPEACRPAAGGAVHTRGLDFACDIYIWAPLAGTCGVLLLSLVITLYCKRGRKKLLYIFKQPFMRPVQTTQEEDGCSCRFPEEEEGGCELRVKFSRSADAPAYKQGQNQLYNELNLGRREEYDVLDKRRGRDPEMGGKPRRKNPQEGLYNELQKDKMAEAYSEIGMKGERRRGKGHDGLYQGLSTATKDTYDALHMQALPPR

SEQ ID NO: 1469 - protein, 246 aa, synthetic construct
  REGION 1..246: note = source = /note="Description of Artificial Sequence: Synthetic polypeptide"
DVVMTQSPLSLPVTLGQPASISCKSSQSLLDSDGKTYLNWLQQRPGQSPRRLISLVSKLDSGVPDRFSGSGSGTDFTLKISRVEAEDVGVYYCWQGTHFPGTFGGGTKVEIKGGGGSGGGGSGGGGSGGGGSEIQLVQSGAEVKKPGESLRISCKGSGFNIEDYYIHWVRQMPGKGLEWMGRIDPENDETKYGPIFQGHVTISADTSINTVYLQWSSLKASDTAMYYCAFRGGVYWGQGTTVTVSS

SEQ ID NO: 1470 - DNA, 738 bp, synthetic construct
  misc_feature 1..738: note = source = /note="Description of Artificial Sequence: Synthetic polynucleotide"
  source 1..738: mol_type = other DNA
gacgtcgtcatgacccagagcccgctgtcactgcctgtgaccctgggccagccggcgtccattagctgcaaatcctcgcaatccctgctcgactcagacggaaaaacgtacttgaactggctccaacagcgccctgggcaatccccaaggcggcttatctcactcgtcagcaagctcgatagcggtgtcccagacagattttcgggctcgggatcgggcactgatttcactctgaagatctcgcgggtggaagccgaggatgtgggagtgtactattgctggcagggcactcacttccccgggacgtttggcggaggaactaaggtcgagatcaaaggaggaggtggatcaggcggaggtgggagcggaggaggaggaagcggtggtggaggttccgaaatccagctggtgcaatcaggagccgaggtgaagaagccgggagaatccctgcgcatctcgtgcaagggctcgggcttcaacatcgaggattactacatccactgggtgcggcagatgccgggaaaggggttggaatggatgggacgcattgacccggaaaatgatgaaaccaaatacgggccaatcttccaaggccacgtgaccattagcgctgacacttccatcaacaccgtgtaccttcagtggtcctcactgaaggcgtcggacactgccatgtactactgtgcattcagaggaggggtctactggggacagggcaccaccgtgaccgtgagctcc

SEQ ID NO: 1471 - DNA, 831 bp, synthetic construct
  misc_feature 1..831: note = source = /note="Description of Artificial Sequence: Synthetic polynucleotide"
  source 1..831: mol_type = other DNA
atggccctccctgtcaccgccctgctgcttccgctggctcttctgctccacgccgctcggcccgacgtcgtcatgacccagagcccgctgtcactgcctgtgaccctgggccagccggcgtccattagctgcaaatcctcgcaatccctgctcgactcagacggaaaaacgtacttgaactggctccaacagcgccctgggcaatccccaaggcggcttatctcactcgtcagcaagctcgatagcggtgtcccagacagattttcgggctcgggatcgggcactgatttcactctgaagatctcgcgggtggaagccgaggatgtgggagtgtactattgctggcagggcactcacttccccgggacgtttggcggaggaactaaggtcgagatcaaaggaggaggtggatcaggcggaggtgggagcggaggaggaggaagcggtggtggaggttccgaaatccagctggtgcaatcaggagccgaggtgaagaagccgggagaatccctgcgcatctcgtgcaagggctcgggcttcaacatcgaggattactacatccactgggtgcggcagatgccgggaaaggggttggaatggatgggacgcattgacccggaaaatgatgaaaccaaatacgggccaatcttccaaggccacgtgaccattagcgctgacacttccatcaacaccgtgtaccttcagtggtcctcactgaaggcgtcggacactgccatgtactactgtgcattcagaggaggggtctactggggacagggcaccaccgtgaccgtgagctccggctcgcatcaccatcatcaccaccatcac

SEQ ID NO: 1472 - protein, 277 aa, synthetic construct
  REGION 1..277: note = source = /note="Description of Artificial Sequence: Synthetic polypeptide"
MALPVTALLLPLALLLHAARPDVVMTQSPLSLPVTLGQPASISCKSSQSLLDSDGKTYLNWLQQRPGQSPRRLISLVSKLDSGVPDRFSGSGSGTDFTLKISRVEAEDVGVYYCWQGTHFPGTFGGGTKVEIKGGGGSGGGGSGGGGSGGGGSEIQLVQSGAEVKKPGESLRISCKGSGFNIEDYYIHWVRQMPGKGLEWMGRIDPENDETKYGPIFQGHVTISADTSINTVYLQWSSLKASDTAMYYCAFRGGVYWGQGTTVTVSSGSHHHHHHHH

SEQ ID NO: 1473 - DNA, 1470 bp, synthetic construct
  misc_feature 1..1470: note = source = /note="Description of Artificial Sequence: Synthetic polynucleotide"
  source 1..1470: mol_type = other DNA
atggccctccctgtcaccgccctgctgcttccgctggctcttctgctccacgccgctcggcccgacgtcgtcatgacccaatcccctctctccctgccggtcaccctgggtcagccggcgtcgatctcatgcaaaagctcacagtccctgctggattcggacggaaaaacctacttgaactggctccaacagaggccgggtcagtcccctcgcagactgatctcgctggtgagcaagctcgactcgggtgtgccggatcggttctccgggtcaggatcgggcaccgactttacgctcaagatttcgagagtggaggccgaggatgtgggagtgtactattgctggcagggcacgcatttccccgggacctttggaggcgggactaaggtggaaatcaagggaggtggcggatcaggcggaggaggcagcggcggaggtggatcaggaggcggagggtcagagatccagctggtccaaagcggagcagaggtgaagaagccaggcgagtcccttcgcatttcgtgcaaagggagcggcttcaacattgaagattactacatccactgggtgcggcaaatgccaggaaagggtctggaatggatgggacggatcgacccagaaaatgatgaaactaagtacggaccgatcttccaaggacacgtcactatctccgcggacacttcgatcaacaccgtgtacctccagtggagcagcttgaaagcctccgacaccgctatgtactactgtgccttccgcggaggagtctactggggacaggggactactgtgaccgtgtcgtccaccactaccccagcaccgaggccacccaccccggctcctaccatcgcctcccagcctctgtccctgcgtccggaggcatgtagacccgcagctggtggggccgtgcatacccggggtcttgacttcgcctgcgatatctacatttgggcccctctggctggtacttgcggggtcctgctgctttcactcgtgatcactctttactgtaagcgcggtcggaagaagctgctgtacatctttaagcaacccttcatgaggcctgtgcagactactcaagaggaggacggctgttcatgccggttcccagaggaggaggaaggcggctgcgaactgcgcgtgaaattcagccgcagcgcagatgctccagcctacaagcaggggcagaaccagctctacaacgaactcaatcttggtcggagagaggagtacgacgtgctggacaagcggagaggacgggacccagaaatgggcgggaagccgcgcagaaagaatccccaagagggcctgtacaacgagctccaaaaggataagatggcagaagcctatagcgagattggtatgaaaggggaacgcagaagaggcaaaggccacgacggactgtaccagggactcagcaccgccaccaaggacacctatgacgctcttcacatgcaggccctgccgcctcgg

SEQ ID NO: 1474 - protein, 490 aa, synthetic construct
  REGION 1..490: note = source = /note="Description of Artificial Sequence: Synthetic polypeptide"
MALPVTALLLPLALLLHAARPDVVMTQSPLSLPVTLGQPASISCKSSQSLLDSDGKTYLNWLQQRPGQSPRRLISLVSKLDSGVPDRFSGSGSGTDFTLKISRVEAEDVGVYYCWQGTHFPGTFGGGTKVEIKGGGGSGGGGSGGGGSGGGGSEIQLVQSGAEVKKPGESLRISCKGSGFNIEDYYIHWVRQMPGKGLEWMGRIDPENDETKYGPIFQGHVTISADTSINTVYLQWSSLKASDTAMYYCAFRGGVYWGQGTTVTVSSTTTPAPRPPTPAPTIASQPLSLRPEACRPAAGGAVHTRGLDFACDIYIWAPLAGTCGVLLLSLVITLYCKRGRKKLLYIFKQPFMRPVQTTQEEDGCSCRFPEEEEGGCELRVKFSRSADAPAYKQGQNQLYNELNLGRREEYDVLDKRRGRDPEMGGKPRRKNPQEGLYNELQKDKMAEAYSEIGMKGERRRGKGHDGLYQGLSTATKDTYDALHMQALPPR

SEQ ID NO: 1475 - protein, 246 aa, synthetic construct
  REGION 1..246: note = source = /note="Description of Artificial Sequence: Synthetic polypeptide"
EIQLVQSGAEVKKPGATVKISCKGSGFNIEDYYIHWVQQAPGKGLEWMGRIDPENDETKYGPIFQGRVTITADTSTNTVYMELSSLRSEDTAVYYCAFRGGVYWGQGTTVTVSSGGGGSGGGGSGGGGSGGGGSDVVMTQSPLSLPVTLGQPASISCKSSQSLLDSDGKTYLNWLQQRPGQSPRRLISLVSKLDSGVPDRFSGSGSGTDFTLKISRVEAEDVGVYYCWQGTHFPGTFGGGTKVEIK

SEQ ID NO: 1476 - DNA, 738 bp, synthetic construct
  misc_feature 1..738: note = source = /note="Description of Artificial Sequence: Synthetic polynucleotide"
  source 1..738: mol_type = other DNA
gaaatccagctcgtgcagagcggagccgaggtcaagaaaccgggtgctaccgtgaagatttcatgcaagggatcgggcttcaacatcgaggattactacatccactgggtgcagcaggcaccaggaaaaggacttgaatggatgggccggatcgacccggaaaatgacgagactaagtacggccctatcttccaaggacgggtgacgatcaccgcagacactagcaccaacaccgtctatatggaactctcgtccctgaggtccgaagatactgccgtgtactactgtgcgtttcgcggaggtgtgtactggggacagggtaccaccgtcaccgtgtcatcgggcggtggaggctccggtggaggagggtcaggaggcggtggaagcggaggaggcggcagcgacgtggtcatgactcaatcgccgctgtcgctgcccgtcactctgggacaacccgcgtccatcagctgcaaatcctcgcagtcactgcttgactccgatggaaagacctacctcaactggctgcagcaacgcccaggccaatccccaagacgcctgatctcgttggtgtcaaagctggactcaggggtgccggaccggttctccgggagcgggtcgggcacggatttcactctcaagatctccagagtggaagccgaggatgtgggagtctactactgctggcagggaacccatttccctggaacttttggcggaggaactaaggtcgagattaaa

SEQ ID NO: 1477 - DNA, 831 bp, synthetic construct
  misc_feature 1..831: note = source = /note="Description of Artificial Sequence: Synthetic polynucleotide"
  source 1..831: mol_type = other DNA
atggccctccctgtcaccgccctgctgcttccgctggctcttctgctccacgccgctcggcccgaaatccagctcgtgcagagcggagccgaggtcaagaaaccgggtgctaccgtgaagatttcatgcaagggatcgggcttcaacatcgaggattactacatccactgggtgcagcaggcaccaggaaaaggacttgaatggatgggccggatcgacccggaaaatgacgagactaagtacggccctatcttccaaggacgggtgacgatcaccgcagacactagcaccaacaccgtctatatggaactctcgtccctgaggtccgaagatactgccgtgtactactgtgcgtttcgcggaggtgtgtactggggacagggtaccaccgtcaccgtgtcatcgggcggtggaggctccggtggaggagggtcaggaggcggtggaagcggaggaggcggcagcgacgtggtcatgactcaatcgccgctgtcgctgcccgtcactctgggacaacccgcgtccatcagctgcaaatcctcgcagtcactgcttgactccgatggaaagacctacctcaactggctgcagcaacgcccaggccaatccccaagacgcctgatctcgttggtgtcaaagctggactcaggggtgccggaccggttctccgggagcgggtcgggcacggatttcactctcaagatctccagagtggaagccgaggatgtgggagtctactactgctggcagggaacccatttccctggaacttttggcggaggaactaaggtcgagattaaagggagccaccatcatcatcaccaccaccac

SEQ ID NO: 1478 - protein, 277 aa, synthetic construct
  REGION 1..277: note = source = /note="Description of Artificial Sequence: Synthetic polypeptide"
MALPVTALLLPLALLLHAARPEIQLVQSGAEVKKPGATVKISCKGSGFNIEDYYIHWVQQAPGKGLEWMGRIDPENDETKYGPIFQGRVTITADTSTNTVYMELSSLRSEDTAVYYCAFRGGVYWGQGTTVTVSSGGGGSGGGGSGGGGSGGGGSDVVMTQSPLSLPVTLGQPASISCKSSQSLLDSDGKTYLNWLQQRPGQSPRRLISLVSKLDSGVPDRFSGSGSGTDFTLKISRVEAEDVGVYYCWQGTHFPGTFGGGTKVEIKGSHHHHHHHH

SEQ ID NO: 1479 - DNA, 1470 bp, synthetic construct
  misc_feature 1..1470: note = source = /note="Description of Artificial Sequence: Synthetic polynucleotide"
  source 1..1470: mol_type = other DNA
atggccctccctgtcaccgccctgctgcttccgctggctcttctgctccacgccgctcggcccgaaatccagctcgtgcagagcggagccgaggtcaagaaaccgggtgctaccgtgaagatttcatgcaagggatcgggcttcaacatcgaggattactacatccactgggtgcagcaggcaccaggaaaaggacttgaatggatgggccggatcgacccggaaaatgacgagactaagtacggccctatcttccaaggacgggtgacgatcaccgcagacactagcaccaacaccgtctatatggaactctcgtccctgaggtccgaagatactgccgtgtactactgtgcgtttcgcggaggtgtgtactggggacagggtaccaccgtcaccgtgtcatcgggcggtggaggctccggtggaggagggtcaggaggcggtggaagcggaggaggcggcagcgacgtggtcatgactcaatcgccgctgtcgctgcccgtcactctgggacaacccgcgtccatcagctgcaaatcctcgcagtcactgcttgactccgatggaaagacctacctcaactggctgcagcaacgcccaggccaatccccaagacgcctgatctcgttggtgtcaaagctggactcaggggtgccggaccggttctccgggagcgggtcgggcacggatttcactctcaagatctccagagtggaagccgaggatgtgggagtctactactgctggcagggaacccatttccctggaacttttggcggaggaactaaggtcgagattaaaaccactaccccagcaccgaggccacccaccccggctcctaccatcgcctcccagcctctgtccctgcgtccggaggcatgtagacccgcagctggtggggccgtgcatacccggggtcttgacttcgcctgcgatatctacatttgggcccctctggctggtacttgcggggtcctgctgctttcactcgtgatcactctttactgtaagcgcggtcggaagaagctgctgtacatctttaagcaacccttcatgaggcctgtgcagactactcaagaggaggacggctgttcatgccggttcccagaggaggaggaaggcggctgcgaactgcgcgtgaaattcagccgcagcgcagatgctccagcctacaagcaggggcagaaccagctctacaacgaactcaatcttggtcggagagaggagtacgacgtgctggacaagcggagaggacgggacccagaaatgggcgggaagccgcgcagaaagaatccccaagagggcctgtacaacgagctccaaaaggataagatggcagaagcctatagcgagattggtatgaaaggggaacgcagaagaggcaaaggccacgacggactgtaccagggactcagcaccgccaccaaggacacctatgacgctcttcacatgcaggccctgccgcctcgg

SEQ ID NO: 1480 - protein, 490 aa, synthetic construct
  REGION 1..490: note = source = /note="Description of Artificial Sequence: Synthetic polypeptide"
MALPVTALLLPLALLLHAARPEIQLVQSGAEVKKPGATVKISCKGSGFNIEDYYIHWVQQAPGKGLEWMGRIDPENDETKYGPIFQGRVTITADTSTNTVYMELSSLRSEDTAVYYCAFRGGVYWGQGTTVTVSSGGGGSGGGGSGGGGSGGGGSDVVMTQSPLSLPVTLGQPASISCKSSQSLLDSDGKTYLNWLQQRPGQSPRRLISLVSKLDSGVPDRFSGSGSGTDFTLKISRVEAEDVGVYYCWQGTHFPGTFGGGTKVEIKTTTPAPRPPTPAPTIASQPLSLRPEACRPAAGGAVHTRGLDFACDIYIWAPLAGTCGVLLLSLVITLYCKRGRKKLLYIFKQPFMRPVQTTQEEDGCSCRFPEEEEGGCELRVKFSRSADAPAYKQGQNQLYNELNLGRREEYDVLDKRRGRDPEMGGKPRRKNPQEGLYNELQKDKMAEAYSEIGMKGERRRGKGHDGLYQGLSTATKDTYDALHMQALPPR

SEQ ID NO: 1481 - protein, 246 aa, synthetic construct
  REGION 1..246: note = source = /note="Description of Artificial Sequence: Synthetic polypeptide"
EIQLVQSGAEVKKPGESLRISCKGSGFNIEDYYIHWVRQMPGKGLEWMGRIDPENDETKYGPIFQGHVTISADTSINTVYLQWSSLKASDTAMYYCAFRGGVYWGQGTTVTVSSGGGGSGGGGSGGGGSGGGGSDVVMTQSPDSLAVSLGERATINCKSSQSLLDSDGKTYLNWLQQKPGQPPKRLISLVSKLDSGVPDRFSGSGSGTDFTLTISSLQAEDVAVYYCWQGTHFPGTFGGGTKVEIK

SEQ ID NO: 1482 - DNA, 738 bp, synthetic construct
  misc_feature 1..738: note = source = /note="Description of Artificial Sequence: Synthetic polynucleotide"
  source 1..738: mol_type = other DNA
gaaatccagctggtgcagtcaggcgccgaggtcaagaagccgggagagtcgctgagaatctcgtgcaagggctcggggttcaacatcgaggactactacattcactgggtcaggcagatgccgggaaagggactggaatggatgggccggatcgacccagaaaatgacgaaaccaaatacgggccgatttttcaaggccacgtgactatcagcgcagacacgagcatcaacactgtctacctccagtggtcctcgcttaaggccagcgataccgctatgtactactgcgcattcagaggcggggtgtactggggacaaggaaccactgtgaccgtgagcagcggaggtggcggctcgggaggaggtgggagcggaggaggaggttccggcggtggaggatcagatgtcgtgatgacccagtccccggactccctcgctgtctcactgggcgagcgcgcgaccatcaactgcaaatcgagccagtcgctgttggactccgatggaaagacttatctgaattggctgcaacagaaaccaggacaacctcccaagcggctcatctcgcttgtgtcaaaactcgattcgggagtgccagaccgcttctcggggtccgggagcggaactgactttactttgaccatttcctcactgcaagcggaggatgtggccgtgtattactgttggcagggcacgcatttccctggaaccttcggtggcggaactaaggtggaaatcaag

SEQ ID NO: 1483 - DNA, 834 bp, synthetic construct
  misc_feature 1..834: note = source = /note="Description of Artificial Sequence: Synthetic polynucleotide"
  source 1..834: mol_type = other DNA
atggccctccctgtcaccgccctgctgcttccgctggctcttctgctccacgccgctcggcccgaaatccagctggtgcagtcaggcgccgaggtcaagaagccgggagagtcgctgagaatctcgtgcaagggctcggggttcaacatcgaggactactacattcactgggtcaggcagatgccgggaaagggactggaatggatgggccggatcgacccagaaaatgacgaaaccaaatacgggccgatttttcaaggccacgtgactatcagcgcagacacgagcatcaacactgtctacctccagtggtcctcgcttaaggccagcgataccgctatgtactactgcgcattcagaggcggggtgtactggggacaaggaaccactgtgaccgtgagcagcggaggtggcggctcgggaggaggtgggagcggaggaggaggttccggcggtggaggatcagatgtcgtgatgacccagtccccggactccctcgctgtctcactgggcgagcgcgcgaccatcaactgcaaatcgagccagtcgctgttggactccgatggaaagacttatctgaattggctgcaacagaaaccaggacaacctcccaagcggctcatctcgcttgtgtcaaaactcgattcgggagtgccagaccgcttctcggggtccgggagcggaactgactttactttgaccatttcctcactgcaagcggaggatgtggccgtgtattactgttggcagggcacgcatttccctggaaccttcggtggcggaactaaggtggaaatcaagggatcacaccaccatcatcaccatcaccaccat

SEQ ID NO: 1484 - protein, 278 aa, synthetic construct
  REGION 1..278: note = source = /note="Description of Artificial Sequence: Synthetic polypeptide"
MALPVTALLLPLALLLHAARPEIQLVQSGAEVKKPGESLRISCKGSGFNIEDYYIHWVRQMPGKGLEWMGRIDPENDETKYGPIFQGHVTISADTSINTVYLQWSSLKASDTAMYYCAFRGGVYWGQGTTVTVSSGGGGSGGGGSGGGGSGGGGSDVVMTQSPDSLAVSLGERATINCKSSQSLLDSDGKTYLNWLQQKPGQPPKRLISLVSKLDSGVPDRFSGSGSGTDFTLTISSLQAEDVAVYYCWQGTHFPGTFGGGTKVEIKGSHHHHHHHHH

SEQ ID NO: 1485 - DNA, 1470 bp, synthetic construct
  misc_feature 1..1470: note = source = /note="Description of Artificial Sequence: Synthetic polynucleotide"
  source 1..1470: mol_type = other DNA
atggccctccctgtcaccgccctgctgcttccgctggctcttctgctccacgccgctcggcccgagattcagctcgtgcaatcgggagcggaagtcaagaagccaggagagtccttgcggatctcatgcaagggtagcggctttaacatcgaggattactacatccactgggtgaggcagatgccggggaagggactcgaatggatgggacggatcgacccagaaaacgacgaaactaagtacggtccgatcttccaaggccatgtgactattagcgccgatacttcaatcaataccgtgtatctgcaatggtcctcattgaaagcctcagataccgcgatgtactactgtgctttcagaggaggggtctactggggacagggaactaccgtgactgtctcgtccggcggaggcgggtcaggaggtggcggcagcggaggaggagggtccggcggaggtgggtccgacgtcgtgatgacccagagccctgacagcctggcagtgagcctgggcgaaagagctaccattaactgcaaatcgtcgcagagcctgctggactcggacggaaaaacgtacctcaattggctgcagcaaaagcctggccagccaccgaagcgccttatctcactggtgtcgaagctggattcgggagtgcccgatcgcttctccggctcgggatcgggtactgacttcaccctcactatctcctcgcttcaagcagaggacgtggccgtctactactgctggcagggaacccactttccgggaaccttcggcggagggacgaaagtggagatcaagaccactaccccagcaccgaggccacccaccccggctcctaccatcgcctcccagcctctgtccctgcgtccggaggcatgtagacccgcagctggtggggccgtgcatacccggggtcttgacttcgcctgcgatatctacatttgggcccctctggctggtacttgcggggtcctgctgctttcactcgtgatcactctttactgtaagcgcggtcggaagaagctgctgtacatctttaagcaacccttcatgaggcctgtgcagactactcaagaggaggacggctgttcatgccggttcccagaggaggaggaaggcggctgcgaactgcgcgtgaaattcagccgcagcgcagatgctccagcctacaagcaggggcagaaccagctctacaacgaactcaatcttggtcggagagaggagtacgacgtgctggacaagcggagaggacgggacccagaaatgggcgggaagccgcgcagaaagaatccccaagagggcctgtacaacgagctccaaaaggataagatggcagaagcctatagcgagattggtatgaaaggggaacgcagaagaggcaaaggccacgacggactgtaccagggactcagcaccgccaccaaggacacctatgacgctcttcacatgcaggccctgccgcctcgg

SEQ ID NO: 1486 - protein, 490 aa, synthetic construct
  REGION 1..490: note = source = /note="Description of Artificial Sequence: Synthetic polypeptide"
MALPVTALLLPLALLLHAARPEIQLVQSGAEVKKPGESLRISCKGSGFNIEDYYIHWVRQMPGKGLEWMGRIDPENDETKYGPIFQGHVTISADTSINTVYLQWSSLKASDTAMYYCAFRGGVYWGQGTTVTVSSGGGGSGGGGSGGGGSGGGGSDVVMTQSPDSLAVSLGERATINCKSSQSLLDSDGKTYLNWLQQKPGQPPKRLISLVSKLDSGVPDRFSGSGSGTDFTLTISSLQAEDVAVYYCWQGTHFPGTFGGGTKVEIKTTTPAPRPPTPAPTIASQPLSLRPEACRPAAGGAVHTRGLDFACDIYIWAPLAGTCGVLLLSLVITLYCKRGRKKLLYIFKQPFMRPVQTTQEEDGCSCRFPEEEEGGCELRVKFSRSADAPAYKQGQNQLYNELNLGRREEYDVLDKRRGRDPEMGGKPRRKNPQEGLYNELQKDKMAEAYSEIGMKGERRRGKGHDGLYQGLSTATKDTYDALHMQALPPR

SEQ ID NO: 1487 - protein, 246 aa, synthetic construct
  REGION 1..246: note = source = /note="Description of Artificial Sequence: Synthetic polypeptide"
DVVMTQSPDSLAVSLGERATINCKSSQSLLDSDGKTYLNWLQQKPGQPPKRLISLVSKLDSGVPDRFSGSGSGTDFTLTISSLQAEDVAVYYCWQGTHFPGTFGGGTKVEIKGGGGSGGGGSGGGGSGGGGSEIQLVQSGAEVKKPGESLRISCKGSGFNIEDYYIHWVRQMPGKGLEWMGRIDPENDETKYGPIFQGHVTISADTSINTVYLQWSSLKASDTAMYYCAFRGGVYWGQGTTVTVSS

SEQ ID NO: 1488 - DNA, 738 bp, synthetic construct
  misc_feature 1..738: note = source = /note="Description of Artificial Sequence: Synthetic polynucleotide"
  source 1..738: mol_type = other DNA
gacgtggtgatgacccaatcgccagattccctggcagtgtccctgggcgaacgcgccactattaactgcaaatcgtcacagtccttgcttgattccgacggaaagacctacctcaattggctccagcagaagccaggacaaccgccaaagagactgatctccctggtgtcaaagctggactcgggagtgcctgatcggttctcgggtagcgggagcggcaccgacttcactctgaccatctcgtcactccaggctgaggacgtggccgtgtattactgttggcagggtactcactttccgggcactttcggaggcggcaccaaggtggagattaaaggaggaggcggaagcggaggtggaggatcgggaggtggtgggagcggcggaggagggagcgagatccagctcgtccaatcgggagcggaagtgaagaagcccggagagtcacttagaatctcatgcaaggggtcgggcttcaacatcgaggattactacatccattgggtccgccagatgcctggtaaaggactggaatggatggggaggattgacccggaaaacgacgaaactaagtacggaccgatctttcaagggcacgtgactatctccgctgatacctcaatcaatactgtctacctccagtggtcctcgctgaaagcaagcgacaccgcgatgtactactgcgccttccggggaggagtgtactggggccaaggcaccacggtcacggtcagctcc

SEQ ID NO: 1489 - DNA, 834 bp, synthetic construct
  misc_feature 1..834: note = source = /note="Description of Artificial Sequence: Synthetic polynucleotide"
  source 1..834: mol_type = other DNA
atggccctccctgtcaccgccctgctgcttccgctggctcttctgctccacgccgctcggcccgacgtggtgatgacccaatcgccagattccctggcagtgtccctgggcgaacgcgccactattaactgcaaatcgtcacagtccttgcttgattccgacggaaagacctacctcaattggctccagcagaagccaggacaaccgccaaagagactgatctccctggtgtcaaagctggactcgggagtgcctgatcggttctcgggtagcgggagcggcaccgacttcactctgaccatctcgtcactccaggctgaggacgtggccgtgtattactgttggcagggtactcactttccgggcactttcggaggcggcaccaaggtggagattaaaggaggaggcggaagcggaggtggaggatcgggaggtggtgggagcggcggaggagggagcgagatccagctcgtccaatcgggagcggaagtgaagaagcccggagagtcacttagaatctcatgcaaggggtcgggcttcaacatcgaggattactacatccattgggtccgccagatgcctggtaaaggactggaatggatggggaggattgacccggaaaacgacgaaactaagtacggaccgatctttcaagggcacgtgactatctccgctgatacctcaatcaatactgtctacctccagtggtcctcgctgaaagcaagcgacaccgcgatgtactactgcgccttccggggaggagtgtactggggccaaggcaccacggtcacggtcagctccggctcccatcaccaccaccatcaccatcatcac

SEQ ID NO: 1490 - protein, 278 aa, synthetic construct
  REGION 1..278: note = source = /note="Description of Artificial Sequence: Synthetic polypeptide"
MALPVTALLLPLALLLHAARPDVVMTQSPDSLAVSLGERATINCKSSQSLLDSDGKTYLNWLQQKPGQPPKRLISLVSKLDSGVPDRFSGSGSGTDFTLTISSLQAEDVAVYYCWQGTHFPGTFGGGTKVEIKGGGGSGGGGSGGGGSGGGGSEIQLVQSGAEVKKPGESLRISCKGSGFNIEDYYIHWVRQMPGKGLEWMGRIDPENDETKYGPIFQGHVTISADTSINTVYLQWSSLKASDTAMYYCAFRGGVYWGQGTTVTVSSGSHHHHHHHHH

SEQ ID NO: 1491 - DNA, 1470 bp, synthetic construct
  misc_feature 1..1470: note = source = /note="Description of Artificial Sequence: Synthetic polynucleotide"
  source 1..1470: mol_type = other DNA
atggccctccctgtcaccgccctgctgcttccgctggctcttctgctccacgccgctcggcccgacgtggtgatgactcagtcgcctgactcgctggctgtgtcccttggagagcgggccactatcaattgcaagtcatcccagtcgctgctggattccgacgggaaaacctacctcaattggctgcagcaaaaaccgggacagcctccaaagcggctcatcagcctggtgtccaagttggacagcggcgtgccagaccgcttctccggttcgggaagcggtactgatttcacgctgaccatctcatccctccaagcggaggatgtggcagtctactactgttggcagggcacgcattttccgggcacttttggaggagggaccaaggtcgaaatcaagggaggaggtggctcgggcggaggaggctcgggaggaggaggatcaggaggcggtggaagcgagattcaactggtccagagcggcgcagaagtcaagaagccgggtgaatcgctcagaatctcgtgcaaaggatcgggattcaacatcgaggactactacattcactgggtcagacaaatgccgggcaaagggctggaatggatggggaggatcgaccccgaaaacgatgaaaccaagtacggaccaatcttccaagggcacgtgaccatttcggcggacacctcaatcaacactgtgtacctccagtggagctcacttaaggccagcgataccgccatgtactattgcgctttccgcggaggggtgtactggggacagggcactactgtgaccgtgtcatccaccactaccccagcaccgaggccacccaccccggctcctaccatcgcctcccagcctctgtccctgcgtccggaggcatgtagacccgcagctggtggggccgtgcatacccggggtcttgacttcgcctgcgatatctacatttgggcccctctggctggtacttgcggggtcctgctgctttcactcgtgatcactctttactgtaagcgcggtcggaagaagctgctgtacatctttaagcaacccttcatgaggcctgtgcagactactcaagaggaggacggctgttcatgccggttcccagaggaggaggaaggcggctgcgaactgcgcgtgaaattcagccgcagcgcagatgctccagcctacaagcaggggcagaaccagctctacaacgaactcaatcttggtcggagagaggagtacgacgtgctggacaagcggagaggacgggacccagaaatgggcgggaagccgcgcagaaagaatccccaagagggcctgtacaacgagctccaaaaggataagatggcagaagcctatagcgagattggtatgaaaggggaacgcagaagaggcaaaggccacgacggactgtaccagggactcagcaccgccaccaaggacacctatgacgctcttcacatgcaggccctgccgcctcgg

SEQ ID NO: 1492 - protein, 490 aa, synthetic construct
  REGION 1..490: note = source = /note="Description of Artificial Sequence: Synthetic polypeptide"
MALPVTALLLPLALLLHAARPDVVMTQSPDSLAVSLGERATINCKSSQSLLDSDGKTYLNWLQQKPGQPPKRLISLVSKLDSGVPDRFSGSGSGTDFTLTISSLQAEDVAVYYCWQGTHFPGTFGGGTKVEIKGGGGSGGGGSGGGGSGGGGSEIQLVQSGAEVKKPGESLRISCKGSGFNIEDYYIHWVRQMPGKGLEWMGRIDPENDETKYGPIFQGHVTISADTSINTVYLQWSSLKASDTAMYYCAFRGGVYWGQGTTVTVSSTTTPAPRPPTPAPTIASQPLSLRPEACRPAAGGAVHTRGLDFACDIYIWAPLAGTCGVLLLSLVITLYCKRGRKKLLYIFKQPFMRPVQTTQEEDGCSCRFPEEEEGGCELRVKFSRSADAPAYKQGQNQLYNELNLGRREEYDVLDKRRGRDPEMGGKPRRKNPQEGLYNELQKDKMAEAYSEIGMKGERRRGKGHDGLYQGLSTATKDTYDALHMQALPPR

SEQ ID NO: 1493 - protein, 246 aa, synthetic construct
  REGION 1..246: note = source = /note="Description of Artificial Sequence: Synthetic polypeptide"
DVVMTQSPLSLPVTLGQPASISCKSSQSLLDSDGKTYLNWLQQRPGQSPRRLISLVSKLDSGVPDRFSGSGSGTDFTLKISRVEAEDVGVYYCWQGTHFPGTFGGGTKVEIKGGGGSGGGGSGGGGSGGGGSEIQLVQSGAEVKKPGATVKISCKGSGFNIEDYYIHWVQQAPGKGLEWMGRIDPENDETKYGPIFQGRVTITADTSTNTVYMELSSLRSEDTAVYYCAFRGGVYWGQGTTVTVSS

SEQ ID NO: 1494 - DNA, 738 bp, synthetic construct
  misc_feature 1..738: note = source = /note="Description of Artificial Sequence: Synthetic polynucleotide"
  source 1..738: mol_type = other DNA
gatgtggtcatgacgcagtcaccactgtccctccccgtgacccttggacagccagcgtcgattagctgcaagtcatcccaatccctgctcgattcggatggaaagacctatctcaactggctgcagcaaagacccggtcagagccctaggagactcatctcgttggtgtcaaagctggacagcggagtgccggaccggttttccggttcgggatcggggacggacttcactctgaagatttcacgggtggaagctgaggatgtgggagtgtactactgctggcagggaacccatttccctggcacttttggcggaggaactaaggtcgaaatcaagggaggaggtggctcgggaggaggcggatcgggcggaggcgggagcggcggaggagggtccgaaatccaacttgtccagtcaggagccgaagtgaagaaaccgggagccaccgtcaaaatcagctgtaagggatcgggattcaatatcgaggactactacatccactgggtgcagcaagctccgggcaaaggactggagtggatggggcgcatcgacccagagaacgacgaaaccaaatacggcccgatcttccaagggcgggtgaccatcaccgcggacacctcaactaacactgtgtacatggagctgagctccctgcgctccgaagatactgcagtctactactgcgccttccgcggtggtgtgtactggggacagggcaccactgtgactgtcagctcg

SEQ ID NO: 1495 - DNA, 831 bp, synthetic construct
  misc_feature 1..831: note = source = /note="Description of Artificial Sequence: Synthetic polynucleotide"
  source 1..831: mol_type = other DNA
atggccctccctgtcaccgccctgctgcttccgctggctcttctgctccacgccgctcggcccgatgtggtcatgacgcagtcaccactgtccctccccgtgacccttggacagccagcgtcgattagctgcaagtcatcccaatccctgctcgattcggatggaaagacctatctcaactggctgcagcaaagacccggtcagagccctaggagactcatctcgttggtgtcaaagctggacagcggagtgccggaccggttttccggttcgggatcggggacggacttcactctgaagatttcacgggtggaagctgaggatgtgggagtgtactactgctggcagggaacccatttccctggcacttttggcggaggaactaaggtcgaaatcaagggaggaggtggctcgggaggaggcggatcgggcggaggcgggagcggcggaggagggtccgaaatccaacttgtccagtcaggagccgaagtgaagaaaccgggagccaccgtcaaaatcagctgtaagggatcgggattcaatatcgaggactactacatccactgggtgcagcaagctccgggcaaaggactggagtggatggggcgcatcgacccagagaacgacgaaaccaaatacggcccgatcttccaagggcgggtgaccatcaccgcggacacctcaactaacactgtgtacatggagctgagctccctgcgctccgaagatactgcagtctactactgcgccttccgcggtggtgtgtactggggacagggcaccactgtgactgtcagctcggggtcccaccatcatcaccaccaccatcac

SEQ ID NO: 1496 - protein, 277 aa, synthetic construct
  REGION 1..277: note = source = /note="Description of Artificial Sequence: Synthetic polypeptide"
MALPVTALLLPLALLLHAARPDVVMTQSPLSLPVTLGQPASISCKSSQSLLDSDGKTYLNWLQQRPGQSPRRLISLVSKLDSGVPDRFSGSGSGTDFTLKISRVEAEDVGVYYCWQGTHFPGTFGGGTKVEIKGGGGSGGGGSGGGGSGGGGSEIQLVQSGAEVKKPGATVKISCKGSGFNIEDYYIHWVQQAPGKGLEWMGRIDPENDETKYGPIFQGRVTITADTSTNTVYMELSSLRSEDTAVYYCAFRGGVYWGQGTTVTVSSGSHHHHHHHH

SEQ ID NO: 1497 - DNA, 1470 bp, synthetic construct
  misc_feature 1..1470: note = source = /note="Description of Artificial Sequence: Synthetic polynucleotide"
  source 1..1470: mol_type = other DNA
atggccctccctgtcaccgccctgctgcttccgctggctcttctgctccacgccgctcggcccgatgtggtcatgacgcagtcaccactgtccctccccgtgacccttggacagccagcgtcgattagctgcaagtcatcccaatccctgctcgattcggatggaaagacctatctcaactggctgcagcaaagacccggtcagagccctaggagactcatctcgttggtgtcaaagctggacagcggagtgccggaccggttttccggttcgggatcggggacggacttcactctgaagatttcacgggtggaagctgaggatgtgggagtgtactactgctggcagggaacccatttccctggcacttttggcggaggaactaaggtcgaaatcaagggaggaggtggctcgggaggaggcggatcgggcggaggcgggagcggcggaggagggtccgaaatccaacttgtccagtcaggagccgaagtgaagaaaccgggagccaccgtcaaaatcagctgtaagggatcgggattcaatatcgaggactactacatccactgggtgcagcaagctccgggcaaaggactggagtggatggggcgcatcgacccagagaacgacgaaaccaaatacggcccgatcttccaagggcgggtgaccatcaccgcggacacctcaactaacactgtgtacatggagctgagctccctgcgctccgaagatactgcagtctactactgcgccttccgcggtggtgtgtactggggacagggcaccactgtgactgtcagctcgaccactaccccagcaccgaggccacccaccccggctcctaccatcgcctcccagcctctgtccctgcgtccggaggcatgtagacccgcagctggtggggccgtgcatacccggggtcttgacttcgcctgcgatatctacatttgggcccctctggctggtacttgcggggtcctgctgctttcactcgtgatcactctttactgtaagcgcggtcggaagaagctgctgtacatctttaagcaacccttcatgaggcctgtgcagactactcaagaggaggacggctgttcatgccggttcccagaggaggaggaaggcggctgcgaactgcgcgtgaaattcagccgcagcgcagatgctccagcctacaagcaggggcagaaccagctctacaacgaactcaatcttggtcggagagaggagtacgacgtgctggacaagcggagaggacgggacccagaaatgggcgggaagccgcgcagaaagaatccccaagagggcctgtacaacgagctccaaaaggataagatggcagaagcctatagcgagattggtatgaaaggggaacgcagaagaggcaaaggccacgacggactgtaccagggactcagcaccgccaccaaggacacctatgacgctcttcacatgcaggccctgccgcctcgg

SEQ ID NO: 1498 - protein, 490 aa, synthetic construct
  REGION 1..490: note = source = /note="Description of Artificial Sequence: Synthetic polypeptide"
MALPVTALLLPLALLLHAARPDVVMTQSPLSLPVTLGQPASISCKSSQSLLDSDGKTYLNWLQQRPGQSPRRLISLVSKLDSGVPDRFSGSGSGTDFTLKISRVEAEDVGVYYCWQGTHFPGTFGGGTKVEIKGGGGSGGGGSGGGGSGGGGSEIQLVQSGAEVKKPGATVKISCKGSGFNIEDYYIHWVQQAPGKGLEWMGRIDPENDETKYGPIFQGRVTITADTSTNTVYMELSSLRSEDTAVYYCAFRGGVYWGQGTTVTVSSTTTPAPRPPTPAPTIASQPLSLRPEACRPAAGGAVHTRGLDFACDIYIWAPLAGTCGVLLLSLVITLYCKRGRKKLLYIFKQPFMRPVQTTQEEDGCSCRFPEEEEGGCELRVKFSRSADAPAYKQGQNQLYNELNLGRREEYDVLDKRRGRDPEMGGKPRRKNPQEGLYNELQKDKMAEAYSEIGMKGERRRGKGHDGLYQGLSTATKDTYDALHMQALPPR

SEQ ID NO: 1499 - protein, 243 aa, synthetic construct
  REGION 1..243: note = source = /note="Description of Artificial Sequence: Synthetic polypeptide"
EIQLQQSGAELVKPGASVKLSCTGSGFNIEDYYIHWVKQRTEQGLEWIGRIDPENDETKYGPIFQGRATITADTSSNTVYLQLSSLTSEDTAVYYCAFRGGVYWGPGTTLTVSSGGGGSGGGGSGGGGSHMDVVMTQSPLTLSVAIGQSASISCKSSQSLLDSDGKTYLNWLLQRPGQSPKRLISLVSKLDSGVPDRFTGSGSGTDFTLRISRVEAEDLGIYYCWQGTHFPGTFGGGTKLEIK

SEQ ID NO: 1500 - DNA, 729 bp, synthetic construct
  misc_feature 1..729: note = source = /note="Description of Artificial Sequence: Synthetic polynucleotide"
  source 1..729: mol_type = other DNA
gagatccagctccaacagagcggagccgaactggtcaaaccgggagcgtcggtgaagttgtcatgcactggatcgggcttcaacatcgaggattactacatccactgggtcaagcaacgcaccgagcaggggctggaatggatcggacggatcgaccccgaaaacgatgaaaccaagtacgggcctatcttccaaggacgggccaccattacggctgacacgtcaagcaataccgtctacctccagctttccagcctgacctccgaggacactgccgtgtactactgcgccttcagaggaggcgtgtactggggaccaggaaccactttgaccgtgtccagcggaggcggtggatcaggaggaggaggctcaggcggtggcggctcgcacatggacgtggtcatgactcagtccccgctgaccctgtcggtggcaattggacagagcgcatccatctcgtgcaagagctcacagtcgctgctggattccgacggaaagacttatctgaactggctgctccaaagaccagggcaatcaccgaaacgccttatctccctggtgtcgaaactcgactcgggtgtgccggatcggtttaccggtagcgggtccggcacggacttcactctccgcatttcgagggtggaagcggaggatctcgggatctactactgttggcagggaacccacttccctgggacttttggaggcggaactaagctggaaatcaag

SEQ ID NO: 1501 - DNA, 822 bp, synthetic construct
  misc_feature 1..822: note = source = /note="Description of Artificial Sequence: Synthetic polynucleotide"
  source 1..822: mol_type = other DNA
atggccctccctgtcaccgccctgctgcttccgctggctcttctgctccacgccgctcggcccgagatccagctccaacagagcggagccgaactggtcaaaccgggagcgtcggtgaagttgtcatgcactggatcgggcttcaacatcgaggattactacatccactgggtcaagcaacgcaccgagcaggggctggaatggatcggacggatcgaccccgaaaacgatgaaaccaagtacgggcctatcttccaaggacgggccaccattacggctgacacgtcaagcaataccgtctacctccagctttccagcctgacctccgaggacactgccgtgtactactgcgccttcagaggaggcgtgtactggggaccaggaaccactttgaccgtgtccagcggaggcggtggatcaggaggaggaggctcaggcggtggcggctcgcacatggacgtggtcatgactcagtccccgctgaccctgtcggtggcaattggacagagcgcatccatctcgtgcaagagctcacagtcgctgctggattccgacggaaagacttatctgaactggctgctccaaagaccagggcaatcaccgaaacgccttatctccctggtgtcgaaactcgactcgggtgtgccggatcggtttaccggtagcgggtccggcacggacttcactctccgcatttcgagggtggaagcggaggatctcgggatctactactgttggcagggaacccacttccctgggacttttggaggcggaactaagctggaaatcaagggtagccatcaccatcaccaccaccatcat

SEQ ID NO: 1502 - protein, 274 aa, synthetic construct
  REGION 1..274: note = source = /note="Description of Artificial Sequence: Synthetic polypeptide"
MALPVTALLLPLALLLHAARPEIQLQQSGAELVKPGASVKLSCTGSGFNIEDYYIHWVKQRTEQGLEWIGRIDPENDETKYGPIFQGRATITADTSSNTVYLQLSSLTSEDTAVYYCAFRGGVYWGPGTTLTVSSGGGGSGGGGSGGGGSHMDVVMTQSPLTLSVAIGQSASISCKSSQSLLDSDGKTYLNWLLQRPGQSPKRLISLVSKLDSGVPDRFTGSGSGTDFTLRISRVEAEDLGIYYCWQGTHFPGTFGGGTKLEIKGSHHHHHHHH

SEQ ID NO: 1503 - DNA, 1461 bp, synthetic construct
  misc_feature 1..1461: note = source = /note="Description of Artificial Sequence: Synthetic polynucleotide"
  source 1..1461: mol_type = other DNA
atggccctccctgtcaccgccctgctgcttccgctggctcttctgctccacgccgctcggcccgagatccagctccaacagagcggagccgaactggtcaaaccgggagcgtcggtgaagttgtcatgcactggatcgggcttcaacatcgaggattactacatccactgggtcaagcaacgcaccgagcaggggctggaatggatcggacggatcgaccccgaaaacgatgaaaccaagtacgggcctatcttccaaggacgggccaccattacggctgacacgtcaagcaataccgtctacctccagctttccagcctgacctccgaggacactgccgtgtactactgcgccttcagaggaggcgtgtactggggaccaggaaccactttgaccgtgtccagcggaggcggtggatcaggaggaggaggctcaggcggtggcggctcgcacatggacgtggtcatgactcagtccccgctgaccctgtcggtggcaattggacagagcgcatccatctcgtgcaagagctcacagtcgctgctggattccgacggaaagacttatctgaactggctgctccaaagaccagggcaatcaccgaaacgccttatctccctggtgtcgaaactcgactcgggtgtgccggatcggtttaccggtagcgggtccggcacggacttcactctccgcatttcgagggtggaagcggaggatctcgggatctactactgttggcagggaacccacttccctgggacttttggaggcggaactaagctggaaatcaagaccactaccccagcaccgaggccacccaccccggctcctaccatcgcctcccagcctctgtccctgcgtccggaggcatgtagacccgcagctggtggggccgtgcatacccggggtcttgacttcgcctgcgatatctacatttgggcccctctggctggtacttgcggggtcctgctgctttcactcgtgatcactctttactgtaagcgcggtcggaagaagctgctgtacatctttaagcaacccttcatgaggcctgtgcagactactcaagaggaggacggctgttcatgccggttcccagaggaggaggaaggcggctgcgaactgcgcgtgaaattcagccgcagcgcagatgctccagcctacaagcaggggcagaaccagctctacaacgaactcaatcttggtcggagagaggagtacgacgtgctggacaagcggagaggacgggacccagaaatgggcgggaagccgcgcagaaagaatccccaagagggcctgtacaacgagctccaaaaggataagatggcagaagcctatagcgagattggtatgaaaggggaacgcagaagaggcaaaggccacgacggactgtaccagggactcagcaccgccaccaaggacacctatgacgctcttcacatgcaggccctgccgcctcgg

SEQ ID NO: 1504 - protein, 487 aa, synthetic construct
  REGION 1..487: note = source = /note="Description of Artificial Sequence: Synthetic polypeptide"
MALPVTALLLPLALLLHAARPEIQLQQSGAELVKPGASVKLSCTGSGFNIEDYYIHWVKQRTEQGLEWIGRIDPENDETKYGPIFQGRATITADTSSNTVYLQLSSLTSEDTAVYYCAFRGGVYWGPGTTLTVSSGGGGSGGGGSGGGGSHMDVVMTQSPLTLSVAIGQSASISCKSSQSLLDSDGKTYLNWLLQRPGQSPKRLISLVSKLDSGVPDRFTGSGSGTDFTLRISRVEAEDLGIYYCWQGTHFPGTFGGGTKLEIKTTTPAPRPPTPAPTIASQPLSLRPEACRPAAGGAVHTRGLDFACDIYIWAPLAGTCGVLLLSLVITLYCKRGRKKLLYIFKQPFMRPVQTTQEEDGCSCRFPEEEEGGCELRVKFSRSADAPAYKQGQNQLYNELNLGRREEYDVLDKRRGRDPEMGGKPRRKNPQEGLYNELQKDKMAEAYSEIGMKGERRRGKGHDGLYQGLSTATKDTYDALHMQALPPR

SEQ ID NO: 1505 - protein, 240 aa, synthetic construct
  REGION 1..240: note = source = /note="Description of Artificial Sequence: Synthetic polypeptide"
DIQMTQSPSSLSASVGDRVTITCRASQGIRNNLAWYQQKPGKAPKRLIYAASNLQSGVPSRFTGSGSGTEFTLIVSSLQPEDFATYYCLQHHSYPLTSGGGTKVEIKRTGSTSGSGKPGSGEGSEVQVLESGGGLVQPGGSLRLSCAASGFTFSSYAMSWVRQAPGKGLEWVSAISGSGGSTNYADSVKGRFTISRDNSKNTLYLQMNSLRAEDTAVYYCAGSSGWSEYWGQGTLVTVSS

SEQ ID NO: 1506 - DNA, 720 bp, synthetic construct
  misc_feature 1..720: note = source = /note="Description of Artificial Sequence: Synthetic polynucleotide"
  source 1..720: mol_type = other DNA
gatatccaaatgactcagagcccttcatccctgagcgccagcgtcggagacagggtgaccatcacgtgccgggcatcccaaggcattagaaataacttggcgtggtatcagcaaaaaccaggaaaggccccgaagcgcctgatctacgcggcctccaaccttcagtcaggagtgccctcgcgcttcaccgggagcggtagcggaactgagtttacccttatcgtgtcgtccctgcagccagaggacttcgcgacctactactgcctccagcatcactcgtacccgttgacttcgggaggcggaaccaaggtcgaaatcaaacgcactggctcgacgtcagggtccggtaaaccgggatcgggagaaggatcggaagtccaagtgctggagagcggaggcggactcgtgcaacctggcgggtcgctgcggctcagctgtgccgcgtcgggttttactttcagctcgtacgctatgtcatgggtgcggcaggctccgggaaaggggctggaatgggtgtccgctatttccggctcgggtggaagcaccaattacgccgactccgtgaagggacgcttcaccatctcacgggataactccaagaatactctgtacctccagatgaactcgctgagagccgaggacaccgcagtgtactactgcgcagggtcaagcggctggtccgaatactggggacagggcaccctcgtcactgtcagctcc

SEQ ID NO: 1507 - DNA, 807 bp, synthetic construct
  misc_feature 1..807: note = source = /note="Description of Artificial Sequence: Synthetic polynucleotide"
  source 1..807: mol_type = other DNA
atggccctccctgtcaccgccctgctgcttccgctggctcttctgctccacgccgctcggcccgatatccaaatgactcagagcccttcatccctgagcgccagcgtcggagacagggtgaccatcacgtgccgggcatcccaaggcattagaaataacttggcgtggtatcagcaaaaaccaggaaaggccccgaagcgcctgatctacgcggcctccaaccttcagtcaggagtgccctcgcgcttcaccgggagcggtagcggaactgagtttacccttatcgtgtcgtccctgcagccagaggacttcgcgacctactactgcctccagcatcactcgtacccgttgacttcgggaggcggaaccaaggtcgaaatcaaacgcactggctcgacgtcagggtccggtaaaccgggatcgggagaaggatcggaagtccaagtgctggagagcggaggcggactcgtgcaacctggcgggtcgctgcggctcagctgtgccgcgtcgggttttactttcagctcgtacgctatgtcatgggtgcggcaggctccgggaaaggggctggaatgggtgtccgctatttccggctcgggtggaagcaccaattacgccgactccgtgaagggacgcttcaccatctcacgggataactccaagaatactctgtacctccagatgaactcgctgagagccgaggacaccgcagtgtactactgcgcagggtcaagcggctggtccgaatactggggacagggcaccctcgtcactgtcagctcccatcaccatcaccaccaccatcac

SEQ ID NO: 1508 - protein, 269 aa, synthetic construct
  REGION 1..269: note = source = /note="Description of Artificial Sequence: Synthetic polypeptide"
MALPVTALLLPLALLLHAARPDIQMTQSPSSLSASVGDRVTITCRASQGIRNNLAWYQQKPGKAPKRLIYAASNLQSGVPSRFTGSGSGTEFTLIVSSLQPEDFATYYCLQHHSYPLTSGGGTKVEIKRTGSTSGSGKPGSGEGSEVQVLESGGGLVQPGGSLRLSCAASGFTFSSYAMSWVRQAPGKGLEWVSAISGSGGSTNYADSVKGRFTISRDNSKNTLYLQMNSLRAEDTAVYYCAGSSGWSEYWGQGTLVTVSSHHHHHHHH

SEQ ID NO: 1509 - DNA, 1452 bp, synthetic construct
  misc_feature 1..1452: note = source = /note="Description of Artificial Sequence: Synthetic polynucleotide"
  source 1..1452: mol_type = other DNA
atggccctccctgtcaccgccctgctgcttccgctggctcttctgctccacgccgctcggcccgatatccaaatgactcagagcccttcatccctgagcgccagcgtcggagacagggtgaccatcacgtgccgggcatcccaaggcattagaaataacttggcgtggtatcagcaaaaaccaggaaaggccccgaagcgcctgatctacgcggcctccaaccttcagtcaggagtgccctcgcgcttcaccgggagcggtagcggaactgagtttacccttatcgtgtcgtccctgcagccagaggacttcgcgacctactactgcctccagcatcactcgtacccgttgacttcgggaggcggaaccaaggtcgaaatcaaacgcactggctcgacgtcagggtccggtaaaccgggatcgggagaaggatcggaagtccaagtgctggagagcggaggcggactcgtgcaacctggcgggtcgctgcggctcagctgtgccgcgtcgggttttactttcagctcgtacgctatgtcatgggtgcggcaggctccgggaaaggggctggaatgggtgtccgctatttccggctcgggtggaagcaccaattacgccgactccgtgaagggacgcttcaccatctcacgggataactccaagaatactctgtacctccagatgaactcgctgagagccgaggacaccgcagtgtactactgcgcagggtcaagcggctggtccgaatactggggacagggcaccctcgtcactgtcagctccaccactaccccagcaccgaggccacccaccccggctcctaccatcgcctcccagcctctgtccctgcgtccggaggcatgtagacccgcagctggtggggccgtgcatacccggggtcttgacttcgcctgcgatatctacatttgggcccctctggctggtacttgcggggtcctgctgctttcactcgtgatcactctttactgtaagcgcggtcggaagaagctgctgtacatctttaagcaacccttcatgaggcctgtgcagactactcaagaggaggacggctgttcatgccggttcccagaggaggaggaaggcggctgcgaactgcgcgtgaaattcagccgcagcgcagatgctccagcctacaagcaggggcagaaccagctctacaacgaactcaatcttggtcggagagaggagtacgacgtgctggacaagcggagaggacgggacccagaaatgggcgggaagccgcgcagaaagaatccccaagagggcctgtacaacgagctccaaaaggataagatggcagaagcctatagcgagattggtatgaaaggggaacgcagaagaggcaaaggccacgacggactgtaccagggactcagcaccgccaccaaggacacctatgacgctcttcacatgcaggccctgccgcctcgg

SEQ ID NO: 1510 - protein, 484 aa, synthetic construct
  REGION 1..484: note = source = /note="Description of Artificial Sequence: Synthetic polypeptide"
MALPVTALLLPLALLLHAARPDIQMTQSPSSLSASVGDRVTITCRASQGIRNNLAWYQQKPGKAPKRLIYAASNLQSGVPSRFTGSGSGTEFTLIVSSLQPEDFATYYCLQHHSYPLTSGGGTKVEIKRTGSTSGSGKPGSGEGSEVQVLESGGGLVQPGGSLRLSCAASGFTFSSYAMSWVRQAPGKGLEWVSAISGSGGSTNYADSVKGRFTISRDNSKNTLYLQMNSLRAEDTAVYYCAGSSGWSEYWGQGTLVTVSSTTTPAPRPPTPAPTIASQPLSLRPEACRPAAGGAVHTRGLDFACDIYIWAPLAGTCGVLLLSLVITLYCKRGRKKLLYIFKQPFMRPVQTTQEEDGCSCRFPEEEEGGCELRVKFSRSADAPAYKQGQNQLYNELNLGRREEYDVLDKRRGRDPEMGGKPRRKNPQEGLYNELQKDKMAEAYSEIGMKGERRRGKGHDGLYQGLSTATKDTYDALHMQALPPR

SEQ ID NO: 1511 - protein, 244 aa, synthetic construct
  REGION 1..244: note = source = /note="Description of Artificial Sequence: Synthetic polypeptide"
QVQLQQSGAEVKKPGASVKVSCKASGYTFTGYYMHWVRQAPGQGLEWMGRINPNSGGTNYAQKFQGRVTMTRDTSISTAYMELSRLRSEDTAVYYCARGRYYGMDVWGQGTMVTVSSGGGGSGGGGSGGGGSGGGGSEIVLTQSPATLSLSPGERATISCRASQSVSSNFAWYQQRPGQAPRLLIYDASNRATGIPPRFSGSGSGTDFTLTISSLEPEDFAAYYCHQRSNWLYTFGQGTKVDIK

SEQ ID NO: 1512 - protein, 488 aa, synthetic construct
  REGION 1..488: note = source = /note="Description of Artificial Sequence: Synthetic polypeptide"
MALPVTALLLPLALLLHAARPQVQLQQSGAEVKKPGASVKVSCKASGYTFTGYYMHWVRQAPGQGLEWMGRINPNSGGTNYAQKFQGRVTMTRDTSISTAYMELSRLRSEDTAVYYCARGRYYGMDVWGQGTMVTVSSGGGGSGGGGSGGGGSGGGGSEIVLTQSPATLSLSPGERATISCRASQSVSSNFAWYQQRPGQAPRLLIYDASNRATGIPPRFSGSGSGTDFTLTISSLEPEDFAAYYCHQRSNWLYTFGQGTKVDIKTTTPAPRPPTPAPTIASQPLSLRPEACRPAAGGAVHTRGLDFACDIYIWAPLAGTCGVLLLSLVITLYCKRGRKKLLYIFKQPFMRPVQTTQEEDGCSCRFPEEEEGGCELRVKFSRSADAPAYKQGQNQLYNELNLGRREEYDVLDKRRGRDPEMGGKPRRKNPQEGLYNELQKDKMAEAYSEIGMKGERRRGKGHDGLYQGLSTATKDTYDALHMQALPPR

SEQ ID NO: 1513 - protein, 253 aa, synthetic construct
  REGION 1..253: note = source = /note="Description of Artificial Sequence: Synthetic polypeptide"
QVQLVQSGAEVKKPGASVKVSCKASGYTFTGYYMHWVRQAPGQGLEWMGWINPNSGGTNYAQKFQGRVTMTRDTSISTAYMELSRLRSDDTAVYYCARDLRRTVVTPRAYYGMDVWGQGTTVTVSSGGGGSGGGGSGGGGSGGGGSDIQLTQSPSTLSASVGDRVTITCQASQDISNSLNWYQQKAGKAPKLLIYDASTLETGVPSRFSGSGSGTDFSFTISSLQPEDIATYYCQQHDNLPLTFGQGTKVEIK

SEQ ID NO: 1514 - protein, 497 aa, synthetic construct
  REGION 1..497: note = source = /note="Description of Artificial Sequence: Synthetic polypeptide"
MALPVTALLLPLALLLHAARPQVQLVQSGAEVKKPGASVKVSCKASGYTFTGYYMHWVRQAPGQGLEWMGWINPNSGGTNYAQKFQGRVTMTRDTSISTAYMELSRLRSDDTAVYYCARDLRRTVVTPRAYYGMDVWGQGTTVTVSSGGGGSGGGGSGGGGSGGGGSDIQLTQSPSTLSASVGDRVTITCQASQDISNSLNWYQQKAGKAPKLLIYDASTLETGVPSRFSGSGSGTDFSFTISSLQPEDIATYYCQQHDNLPLTFGQGTKVEIKTTTPAPRPPTPAPTIASQPLSLRPEACRPAAGGAVHTRGLDFACDIYIWAPLAGTCGVLLLSLVITLYCKRGRKKLLYIFKQPFMRPVQTTQEEDGCSCRFPEEEEGGCELRVKFSRSADAPAYKQGQNQLYNELNLGRREEYDVLDKRRGRDPEMGGKPRRKNPQEGLYNELQKDKMAEAYSEIGMKGERRRGKGHDGLYQGLSTATKDTYDALHMQALPPR

SEQ ID NO: 1515 - protein, 246 aa, synthetic construct
  REGION 1..246: note = source = /note="Description of Artificial Sequence: Synthetic polypeptide"
QVQLVQSGAEVKKPGAPVKVSCKASGYTFTGYYMHWVRQAPGQGLEWMGWINPNSGGTNYAQKFQGRVTMTRDTSISTAYMELSRLRSDDTAVYYCARGEWDGSYYYDYWGQGTLVTVSSGGGGSGGGGSGGGGSGGGGSDIVLTQTPSSLSASVGDRVTITCRASQSINTYLNWYQHKPGKAPKLLIYAASSLQSGVPSRFSGSGSGTDFTLTISSLQPEDFATYYCQQSFSPLTFGGGTKLEIK

SEQ ID NO: 1516 - protein, 490 aa, synthetic construct
  REGION 1..490: note = source = /note="Description of Artificial Sequence: Synthetic polypeptide"
MALPVTALLLPLALLLHAARPQVQLVQSGAEVKKPGAPVKVSCKASGYTFTGYYMHWVRQAPGQGLEWMGWINPNSGGTNYAQKFQGRVTMTRDTSISTAYMELSRLRSDDTAVYYCARGEWDGSYYYDYWGQGTLVTVSSGGGGSGGGGSGGGGSGGGGSDIVLTQTPSSLSASVGDRVTITCRASQSINTYLNWYQHKPGKAPKLLIYAASSLQSGVPSRFSGSGSGTDFTLTISSLQPEDFATYYCQQSFSPLTFGGGTKLEIKTTTPAPRPPTPAPTIASQPLSLRPEACRPAAGGAVHTRGLDFACDIYIWAPLAGTCGVLLLSLVITLYCKRGRKKLLYIFKQPFMRPVQTTQEEDGCSCRFPEEEEGGCELRVKFSRSADAPAYKQGQNQLYNELNLGRREEYDVLDKRRGRDPEMGGKPRRKNPQEGLYNELQKDKMAEAYSEIGMKGERRRGKGHDGLYQGLSTATKDTYDALHMQALPPR

SEQ ID NO: 1517 - protein, 242 aa, synthetic construct
  REGION 1..242: note = source = /note="Description of Artificial Sequence: Synthetic polypeptide"
QVQLVESGGGLVQPGGSLRLSCAASGFTFSSYWMHWVRQVPGKGLVWVSRINTDGSTTTYADSVEGRFTISRDNAKNTLYLQMNSLRDDDTAVYYCVGGHWAVWGQGTTVTVSSGGGGSGGGGSGGGGSGGGGSDIQMTQSPSTLSASVGDRVTITCRASQSISDRLAWYQQKPGKAPKLLIYKASSLESGVPSRFSGSGSGTEFTLTISSLQPDDFAVYYCQQYGHLPMYTFGQGTKVEIK

SEQ ID NO: 1518 - protein, 486 aa, synthetic construct
  REGION 1..486: note = source = /note="Description of Artificial Sequence: Synthetic polypeptide"
MALPVTALLLPLALLLHAARPQVQLVESGGGLVQPGGSLRLSCAASGFTFSSYWMHWVRQVPGKGLVWVSRINTDGSTTTYADSVEGRFTISRDNAKNTLYLQMNSLRDDDTAVYYCVGGHWAVWGQGTTVTVSSGGGGSGGGGSGGGGSGGGGSDIQMTQSPSTLSASVGDRVTITCRASQSISDRLAWYQQKPGKAPKLLIYKASSLESGVPSRFSGSGSGTEFTLTISSLQPDDFAVYYCQQYGHLPMYTFGQGTKVEIKTTTPAPRPPTPAPTIASQPLSLRPEACRPAAGGAVHTRGLDFACDIYIWAPLAGTCGVLLLSLVITLYCKRGRKKLLYIFKQPFMRPVQTTQEEDGCSCRFPEEEEGGCELRVKFSRSADAPAYKQGQNQLYNELNLGRREEYDVLDKRRGRDPEMGGKPRRKNPQEGLYNELQKDKMAEAYSEIGMKGERRRGKGHDGLYQGLSTATKDTYDALHMQALPPR

SEQ ID NO: 1519 - protein, 241 aa, synthetic construct
  REGION 1..241: note = source = /note="Description of Artificial Sequence: Synthetic polypeptide"
QVQLVQSGAEVEKPGASVKVSCKASGYTFTDYYMHWVRQAPGQGLEWMGWINPNSGGTNYAQKFQGRVTMTRDTSISTAYMELSRLRSDDTAVYYCASGWDFDYWGQGTLVTVSSGGGGSGGGGSGGGGSGGGGSDIVMTQSPSSLSASVGDRVTITCRASQSIRYYLSWYQQKPGKAPKLLIYTASILQNGVPSRFSGSGSGTDFTLTISSLQPEDFATYYCLQTYTTPDFGPGTKVEIK

SEQ ID NO: 1520 - protein, 485 aa, synthetic construct
  REGION 1..485: note = source = /note="Description of Artificial Sequence: Synthetic polypeptide"
MALPVTALLLPLALLLHAARPQVQLVQSGAEVEKPGASVKVSCKASGYTFTDYYMHWVRQAPGQGLEWMGWINPNSGGTNYAQKFQGRVTMTRDTSISTAYMELSRLRSDDTAVYYCASGWDFDYWGQGTLVTVSSGGGGSGGGGSGGGGSGGGGSDIVMTQSPSSLSASVGDRVTITCRASQSIRYYLSWYQQKPGKAPKLLIYTASILQNGVPSRFSGSGSGTDFTLTISSLQPEDFATYYCLQTYTTPDFGPGTKVEIKTTTPAPRPPTPAPTIASQPLSLRPEACRPAAGGAVHTRGLDFACDIYIWAPLAGTCGVLLLSLVITLYCKRGRKKLLYIFKQPFMRPVQTTQEEDGCSCRFPEEEEGGCELRVKFSRSADAPAYKQGQNQLYNELNLGRREEYDVLDKRRGRDPEMGGKPRRKNPQEGLYNELQKDKMAEAYSEIGMKGERRRGKGHDGLYQGLSTATKDTYDALHMQALPPR

SEQ ID NO: 1521 - protein, 253 aa, synthetic construct
  REGION 1..253: note = source = /note="Description of Artificial Sequence: Synthetic polypeptide"
QVQLVQSGAEVKKPGASVKVSCKASGYTFTSYYMHWVRQAPGQGLEWMGIINPSGGSTSYAQKFQGRVTMTRDTSTSTVYMELSSLRSEDTAVYYCARYRLIAVAGDYYYYGMDVWGQGTMVTVSSGGGGSGGGGSGGGGSGGGGSDIQMTQSPSSVSASVGDRVTITCRASQGVGRWLAWYQQKPGTAPKLLIYAASTLQSGVPSRFSGSGSGTDFTLTINNLQPEDFATYYCQQANSFPLTFGGGTRLEIK

SEQ ID NO: 1522 - protein, 497 aa, synthetic construct
  REGION 1..497: note = source = /note="Description of Artificial Sequence: Synthetic polypeptide"
MALPVTALLLPLALLLHAARPQVQLVQSGAEVKKPGASVKVSCKASGYTFTSYYMHWVRQAPGQGLEWMGIINPSGGSTSYAQKFQGRVTMTRDTSTSTVYMELSSLRSEDTAVYYCARYRLIAVAGDYYYYGMDVWGQGTMVTVSSGGGGSGGGGSGGGGSGGGGSDIQMTQSPSSVSASVGDRVTITCRASQGVGRWLAWYQQKPGTAPKLLIYAASTLQSGVPSRFSGSGSGTDFTLTINNLQPEDFATYYCQQANSFPLTFGGGTRLEIKTTTPAPRPPTPAPTIASQPLSLRPEACRPAAGGAVHTRGLDFACDIYIWAPLAGTCGVLLLSLVITLYCKRGRKKLLYIFKQPFMRPVQTTQEEDGCSCRFPEEEEGGCELRVKFSRSADAPAYKQGQNQLYNELNLGRREEYDVLDKRRGRDPEMGGKPRRKNPQEGLYNELQKDKMAEAYSEIGMKGERRRGKGHDGLYQGLSTATKDTYDALHMQALPPR

SEQ ID NO: 1523 - protein, 250 aa, synthetic construct
  REGION 1..250: note = source = /note="Description of Artificial Sequence: Synthetic polypeptide"
QVQLVQSGGGVVQPGRSLRLSCAASGFTFSSYAMHWVRQAPGKGLEWVAVISYDGSNKYYADSVKGRFTISRDNSKNTLYLQMNSLRAEDTAVYYCARWKVSSSSPAFDYWGQGTLVTVSSGGGGSGGGGSGGGGSGGGGSEIVLTQSPATLSLSPGERAILSCRASQSVYTKYLGWYQQKPGQAPRLLIYDASTRATGIPDRFSGSGSGTDFTLTINRLEPEDFAVYYCQHYGGSPLITFGQGTRLEIK

SEQ ID NO: 1524 - protein, 494 aa, synthetic construct
  REGION 1..494: note = source = /note="Description of Artificial Sequence: Synthetic polypeptide"
MALPVTALLLPLALLLHAARPQVQLVQSGGGVVQPGRSLRLSCAASGFTFSSYAMHWVRQAPGKGLEWVAVISYDGSNKYYADSVKGRFTISRDNSKNTLYLQMNSLRAEDTAVYYCARWKVSSSSPAFDYWGQGTLVTVSSGGGGSGGGGSGGGGSGGGGSEIVLTQSPATLSLSPGERAILSCRASQSVYTKYLGWYQQKPGQAPRLLIYDASTRATGIPDRFSGSGSGTDFTLTINRLEPEDFAVYYCQHYGGSPLITFGQGTRLEIKTTTPAPRPPTPAPTIASQPLSLRPEACRPAAGGAVHTRGLDFACDIYIWAPLAGTCGVLLLSLVITLYCKRGRKKLLYIFKQPFMRPVQTTQEEDGCSCRFPEEEEGGCELRVKFSRSADAPAYKQGQNQLYNELNLGRREEYDVLDKRRGRDPEMGGKPRRKNPQEGLYNELQKDKMAEAYSEIGMKGERRRGKGHDGLYQGLSTATKDTYDALHMQALPPR

SEQ ID NO: 1525 - protein, 246 aa, synthetic construct
  REGION 1..246: note = source = /note="Description of Artificial Sequence: Synthetic polypeptide"
QVQLQQSGAEVKKPGASVKVSCKTSGYPFTGYSLHWVRQAPGQGLEWMGWINPNSGGTNYAQKFQGRVTMTRDTSISTAYMELSRLRSDDTAVYYCARDHYGGNSLFYWGQGTLVTVSSGGGGSGGGGSGGGGSGGGGSDIQLTQSPSSISASVGDTVSITCRASQDSGTWLAWYQQKPGKAPNLLMYDASTLEDGVPSRFSGSASGTEFTLTVNRLQPEDSATYYCQQYNSYPLTFGGGTKVDIK

SEQ ID NO: 1526 - protein, 490 aa, synthetic construct
  REGION 1..490: note = source = /note="Description of Artificial Sequence: Synthetic polypeptide"
MALPVTALLLPLALLLHAARPQVQLQQSGAEVKKPGASVKVSCKTSGYPFTGYSLHWVRQAPGQGLEWMGWINPNSGGTNYAQKFQGRVTMTRDTSISTAYMELSRLRSDDTAVYYCARDHYGGNSLFYWGQGTLVTVSSGGGGSGGGGSGGGGSGGGGSDIQLTQSPSSISASVGDTVSITCRASQDSGTWLAWYQQKPGKAPNLLMYDASTLEDGVPSRFSGSASGTEFTLTVNRLQPEDSATYYCQQYNSYPLTFGGGTKVDIKTTTPAPRPPTPAPTIASQPLSLRPEACRPAAGGAVHTRGLDFACDIYIWAPLAGTCGVLLLSLVITLYCKRGRKKLLYIFKQPFMRPVQTTQEEDGCSCRFPEEEEGGCELRVKFSRSADAPAYKQGQNQLYNELNLGRREEYDVLDKRRGRDPEMGGKPRRKNPQEGLYNELQKDKMAEAYSEIGMKGERRRGKGHDGLYQGLSTATKDTYDALHMQALPPR

SEQ ID NO: 1527 - protein, 248 aa, synthetic construct
  REGION 1..248: note = source = /note="Description of Artificial Sequence: Synthetic polypeptide"
QVQLVQSGAEVKKPGASVEVSCKASGYTFTSYYMHWVRQAPGQGLEWMGIINPSGGSTGYAQKFQGRVTMTRDTSTSTVHMELSSLRSEDTAVYYCARGGYSSSSDAFDIWGQGTMVTVSSGGGGSGGGGSGGGGSGGGGSDIQMTQSPPSLSASVGDRVTITCRASQDISSALAWYQQKPGTPPKLLIYDASSLESGVPSRFSGSGSGTDFTLTISSLQPEDFATYYCQQFSSYPLTFGGGTRLEIK

SEQ ID NO: 1528 - protein, 492 aa, synthetic construct
  REGION 1..492: note = source = /note="Description of Artificial Sequence: Synthetic polypeptide"
MALPVTALLLPLALLLHAARPQVQLVQSGAEVKKPGASVEVSCKASGYTFTSYYMHWVRQAPGQGLEWMGIINPSGGSTGYAQKFQGRVTMTRDTSTSTVHMELSSLRSEDTAVYYCARGGYSSSSDAFDIWGQGTMVTVSSGGGGSGGGGSGGGGSGGGGSDIQMTQSPPSLSASVGDRVTITCRASQDISSALAWYQQKPGTPPKLLIYDASSLESGVPSRFSGSGSGTDFTLTISSLQPEDFATYYCQQFSSYPLTFGGGTRLEIKTTTPAPRPPTPAPTIASQPLSLRPEACRPAAGGAVHTRGLDFACDIYIWAPLAGTCGVLLLSLVITLYCKRGRKKLLYIFKQPFMRPVQTTQEEDGCSCRFPEEEEGGCELRVKFSRSADAPAYKQGQNQLYNELNLGRREEYDVLDKRRGRDPEMGGKPRRKNPQEGLYNELQKDKMAEAYSEIGMKGERRRGKGHDGLYQGLSTATKDTYDALHMQALPPR

SEQ ID NO: 1529 - protein, 255 aa, synthetic construct
  REGION 1..255: note = source = /note="Description of Artificial Sequence: Synthetic polypeptide"
QVQLVQSGAEVKKPGASVKVSCKASGYTFTSYGISWVRQAPGQGLEWMGWISAYNGNTNYAQKLQGRVTMTTDTSTSTAYMELRSLRSDDTAVYYCARVAGGIYYYYGMDVWGQGTTITVSSGGGGSGGGGSGGGGSGGGGSDIVMTQTPDSLAVSLGERATISCKSSHSVLYNRNNKNYLAWYQQKPGQPPKLLFYWASTRKSGVPDRFSGSGSGTDFTLTISSLQPEDFATYFCQQTQTFPLTFGQGTRLEIN

SEQ ID NO: 1530 - protein, 499 aa, synthetic construct
  REGION 1..499: note = source = /note="Description of Artificial Sequence: Synthetic polypeptide"
MALPVTALLLPLALLLHAARPQVQLVQSGAEVKKPGASVKVSCKASGYTFTSYGISWVRQAPGQGLEWMGWISAYNGNTNYAQKLQGRVTMTTDTSTSTAYMELRSLRSDDTAVYYCARVAGGIYYYYGMDVWGQGTTITVSSGGGGSGGGGSGGGGSGGGGSDIVMTQTPDSLAVSLGERATISCKSSHSVLYNRNNKNYLAWYQQKPGQPPKLLFYWASTRKSGVPDRFSGSGSGTDFTLTISSLQPEDFATYFCQQTQTFPLTFGQGTRLEINTTTPAPRPPTPAPTIASQPLSLRPEACRPAAGGAVHTRGLDFACDIYIWAPLAGTCGVLLLSLVITLYCKRGRKKLLYIFKQPFMRPVQTTQEEDGCSCRFPEEEEGGCELRVKFSRSADAPAYKQGQNQLYNELNLGRREEYDVLDKRRGRDPEMGGKPRRKNPQEGLYNELQKDKMAEAYSEIGMKGERRRGKGHDGLYQGLSTATKDTYDALHMQALPPR

SEQ ID NO: 1531 - protein, 241 aa, synthetic construct
  REGION 1..241: note = source = /note="Description of Artificial Sequence: Synthetic polypeptide"
QVQLQQSGAEVKKPGASVKVSCKASGYTFTGYYMHWVRQAPGQGLEWMGWINPNSGGTNYAQNFQGRVTMTRDTSISTAYMELRRLRSDDTAVYYCASGWDFDYWGQGTLVTVSSGGGGSGGGGSGGGGSGGGGSDIRMTQSPSSLSASVGDRVTITCRASQSIRYYLSWYQQKPGKAPKLLIYTASILQNGVPSRFSGSGSGTDFTLTISSLQPEDFATYYCLQTYTTPDFGPGTKVEIK

SEQ ID NO: 1532 - protein, 485 aa, synthetic construct
  REGION 1..485: note = source = /note="Description of Artificial Sequence: Synthetic polypeptide"
MALPVTALLLPLALLLHAARPQVQLQQSGAEVKKPGASVKVSCKASGYTFTGYYMHWVRQAPGQGLEWMGWINPNSGGTNYAQNFQGRVTMTRDTSISTAYMELRRLRSDDTAVYYCASGWDFDYWGQGTLVTVSSGGGGSGGGGSGGGGSGGGGSDIRMTQSPSSLSASVGDRVTITCRASQSIRYYLSWYQQKPGKAPKLLIYTASILQNGVPSRFSGSGSGTDFTLTISSLQPEDFATYYCLQTYTTPDFGPGTKVEIKTTTPAPRPPTPAPTIASQPLSLRPEACRPAAGGAVHTRGLDFACDIYIWAPLAGTCGVLLLSLVITLYCKRGRKKLLYIFKQPFMRPVQTTQEEDGCSCRFPEEEEGGCELRVKFSRSADAPAYKQGQNQLYNELNLGRREEYDVLDKRRGRDPEMGGKPRRKNPQEGLYNELQKDKMAEAYSEIGMKGERRRGKGHDGLYQGLSTATKDTYDALHMQALPPR

SEQ ID NO: 1533 - protein, 246 aa, synthetic construct
  REGION 1..246: note = source = /note="Description of Artificial Sequence: Synthetic polypeptide"
QVQLVQSGAEVKKPGASVKVSCKASGYTFTGYYMHWVRQAPGQGLEWMGRINPNSGGTNYAQKFQGRVTMTTDTSTSTAYMELRSLRSDDTAVYYCARTTTSYAFDIWGQGTMVTVSSGGGGSGGGGSGGGGSGGGGSDIQLTQSPSTLSASVGDRVTITCRASQSISTWLAWYQQKPGKAPNLLIYKASTLESGVPSRFSGSGSGTEFTLTISSLQPDDFATYYCQQYNTYSPYTFGQGTKLEIK

SEQ ID NO: 1534 - protein, 490 aa, synthetic construct
  REGION 1..490: note = source = /note="Description of Artificial Sequence: Synthetic polypeptide"
MALPVTALLLPLALLLHAARPQVQLVQSGAEVKKPGASVKVSCKASGYTFTGYYMHWVRQAPGQGLEWMGRINPNSGGTNYAQKFQGRVTMTTDTSTSTAYMELRSLRSDDTAVYYCARTTTSYAFDIWGQGTMVTVSSGGGGSGGGGSGGGGSGGGGSDIQLTQSPSTLSASVGDRVTITCRASQSISTWLAWYQQKPGKAPNLLIYKASTLESGVPSRFSGSGSGTEFTLTISSLQPDDFATYYCQQYNTYSPYTFGQGTKLEIKTTTPAPRPPTPAPTIASQPLSLRPEACRPAAGGAVHTRGLDFACDIYIWAPLAGTCGVLLLSLVITLYCKRGRKKLLYIFKQPFMRPVQTTQEEDGCSCRFPEEEEGGCELRVKFSRSADAPAYKQGQNQLYNELNLGRREEYDVLDKRRGRDPEMGGKPRRKNPQEGLYNELQKDKMAEAYSEIGMKGERRRGKGHDGLYQGLSTATKDTYDALHMQALPPR

SEQ ID NO: 1535 - protein, 249 aa, synthetic construct
  REGION 1..249: note = source = /note="Description of Artificial Sequence: Synthetic polypeptide"
QVQLVQSGGGLVKPGGSLRLSCEASGFIFSDYYMGWIRQAPGKGLEWVSYIGRSGSSMYYADSVKGRFTFSRDNAKNSLYLQMNSLRAEDTAVYYCAASPVVAATEDFQHWGQGTLVTVSSGGGGSGGGGSGGGGSGGGGSDIVMTQTPATLSLSPGERATLSCRASQSVTSNYLAWYQQKPGQAPRLLLFGASTRATGIPDRFSGSGSGTDFTLTINRLEPEDFAMYYCQQYGSAPVTFGQGTKLEIK

SEQ ID NO: 1536 - protein, 493 aa, synthetic construct
  REGION 1..493: note = source = /note="Description of Artificial Sequence: Synthetic polypeptide"
MALPVTALLLPLALLLHAARPQVQLVQSGGGLVKPGGSLRLSCEASGFIFSDYYMGWIRQAPGKGLEWVSYIGRSGSSMYYADSVKGRFTFSRDNAKNSLYLQMNSLRAEDTAVYYCAASPVVAATEDFQHWGQGTLVTVSSGGGGSGGGGSGGGGSGGGGSDIVMTQTPATLSLSPGERATLSCRASQSVTSNYLAWYQQKPGQAPRLLLFGASTRATGIPDRFSGSGSGTDFTLTINRLEPEDFAMYYCQQYGSAPVTFGQGTKLEIKTTTPAPRPPTPAPTIASQPLSLRPEACRPAAGGAVHTRGLDFACDIYIWAPLAGTCGVLLLSLVITLYCKRGRKKLLYIFKQPFMRPVQTTQEEDGCSCRFPEEEEGGCELRVKFSRSADAPAYKQGQNQLYNELNLGRREEYDVLDKRRGRDPEMGGKPRRKNPQEGLYNELQKDKMAEAYSEIGMKGERRRGKGHDGLYQGLSTATKDTYDALHMQALPPR

SEQ ID NO: 1537 - protein, 249 aa, synthetic construct
  REGION 1..249: note = source = /note="Description of Artificial Sequence: Synthetic polypeptide"
QVQLVQSGAEVRAPGASVKISCKASGFTFRGYYIHWVRQAPGQGLEWMGIINPSGGSRAYAQKFQGRVTMTRDTSTSTVYMELSSLRSDDTAMYYCARTASCGGDCYYLDYWGQGTLVTVSSGGGGSGGGGSGGGGSGGGGSDIQMTQSPPTLSASVGDRVTITCRASENVNIWLAWYQQKPGKAPKLLIYKSSSLASGVPSRFSGSGSGAEFTLTISSLQPDDFATYYCQQYQSYPLTFGGGTKVDIK

SEQ ID NO: 1538 - protein, 493 aa, synthetic construct
  REGION 1..493: note = source = /note="Description of Artificial Sequence: Synthetic polypeptide"
MALPVTALLLPLALLLHAARPQVQLVQSGAEVRAPGASVKISCKASGFTFRGYYIHWVRQAPGQGLEWMGIINPSGGSRAYAQKFQGRVTMTRDTSTSTVYMELSSLRSDDTAMYYCARTASCGGDCYYLDYWGQGTLVTVSSGGGGSGGGGSGGGGSGGGGSDIQMTQSPPTLSASVGDRVTITCRASENVNIWLAWYQQKPGKAPKLLIYKSSSLASGVPSRFSGSGSGAEFTLTISSLQPDDFATYYCQQYQSYPLTFGGGTKVDIKTTTPAPRPPTPAPTIASQPLSLRPEACRPAAGGAVHTRGLDFACDIYIWAPLAGTCGVLLLSLVITLYCKRGRKKLLYIFKQPFMRPVQTTQEEDGCSCRFPEEEEGGCELRVKFSRSADAPAYKQGQNQLYNELNLGRREEYDVLDKRRGRDPEMGGKPRRKNPQEGLYNELQKDKMAEAYSEIGMKGERRRGKGHDGLYQGLSTATKDTYDALHMQALPPR

SEQ ID NO: 1539 - protein, 244 aa, synthetic construct
  REGION 1..244: note = source = /note="Description of Artificial Sequence: Synthetic polypeptide"
QVQLVQSGGGLVQPGRSLRLSCAASGFTFDDYAMHWVRQAPGKGLEWVSGISWNSGSIGYADSVKGRFTISRDNAKNSLYLQMNSLRAEDTAVYYCAKDGSSSWSWGYFDYWGQGTLVTVSSGGGGSGGGGSGGGGSSSELTQDPAVSVALGQTVRTTCQGDALRSYYASWYQQKPGQAPMLVIYGKNNRPSGIPDRFSGSDSGDTASLTITGAQAEDEADYYCNSRDSSGYPVFGTGTKVTVL

SEQ ID NO: 1540 - protein, 488 aa, synthetic construct
  REGION 1..488: note = source = /note="Description of Artificial Sequence: Synthetic polypeptide"
MALPVTALLLPLALLLHAARPQVQLVQSGGGLVQPGRSLRLSCAASGFTFDDYAMHWVRQAPGKGLEWVSGISWNSGSIGYADSVKGRFTISRDNAKNSLYLQMNSLRAEDTAVYYCAKDGSSSWSWGYFDYWGQGTLVTVSSGGGGSGGGGSGGGGSSSELTQDPAVSVALGQTVRTTCQGDALRSYYASWYQQKPGQAPMLVIYGKNNRPSGIPDRFSGSDSGDTASLTITGAQAEDEADYYCNSRDSSGYPVFGTGTKVTVLTTTPAPRPPTPAPTIASQPLSLRPEACRPAAGGAVHTRGLDFACDIYIWAPLAGTCGVLLLSLVITLYCKRGRKKLLYIFKQPFMRPVQTTQEEDGCSCRFPEEEEGGCELRVKFSRSADAPAYKQGQNQLYNELNLGRREEYDVLDKRRGRDPEMGGKPRRKNPQEGLYNELQKDKMAEAYSEIGMKGERRRGKGHDGLYQGLSTATKDTYDALHMQALPPR

SEQ ID NO: 1541 - protein, 246 aa, synthetic construct
  REGION 1..246: note = source = /note="Description of Artificial Sequence: Synthetic polypeptide"
EVQLVESGGGLVQPGRSLRLSCAASGFTFDDYAMHWVRQAPGKGLEWVSGISWNSGSTGYADSVKGRFTISRDNAKNSLYLQMNSLRAEDTALYYCAKDSSSWYGGGSAFDIWGQGTMVTVSSGGGGSGGGGSGGGGSSSELTQEPAVSVALGQTVRITCQGDSLRSYYASWYQQKPGQAPVLVIFGRSRRPSGIPDRFSGSSSGNTASLIITGAQAEDEADYYCNSRDNTANHYVFGTGTKLTVL

SEQ ID NO: 1542 - protein, 490 aa, synthetic construct
  REGION 1..490: note = source = /note="Description of Artificial Sequence: Synthetic polypeptide"
MALPVTALLLPLALLLHAARPEVQLVESGGGLVQPGRSLRLSCAASGFTFDDYAMHWVRQAPGKGLEWVSGISWNSGSTGYADSVKGRFTISRDNAKNSLYLQMNSLRAEDTALYYCAKDSSSWYGGGSAFDIWGQGTMVTVSSGGGGSGGGGSGGGGSSSELTQEPAVSVALGQTVRITCQGDSLRSYYASWYQQKPGQAPVLVIFGRSRRPSGIPDRFSGSSSGNTASLIITGAQAEDEADYYCNSRDNTANHYVFGTGTKLTVLTTTPAPRPPTPAPTIASQPLSLRPEACRPAAGGAVHTRGLDFACDIYIWAPLAGTCGVLLLSLVITLYCKRGRKKLLYIFKQPFMRPVQTTQEEDGCSCRFPEEEEGGCELRVKFSRSADAPAYKQGQNQLYNELNLGRREEYDVLDKRRGRDPEMGGKPRRKNPQEGLYNELQKDKMAEAYSEIGMKGERRRGKGHDGLYQGLSTATKDTYDALHMQALPPR

SEQ ID NO: 1543 - protein, 246 aa, synthetic construct
  REGION 1..246: note = source = /note="Description of Artificial Sequence: Synthetic polypeptide"
EVQLVESGGGLVQPGRSLRLSCAASGFTFDDYAMHWVRQAPGKGLEWVSGISWNSGSTGYADSVKGRFTISRDNAKNSLYLQMNSLRAEDTALYYCAKDSSSWYGGGSAFDIWGQGTMVTVSSGGGGSGGGGSGGGGSSSELTQDPAVSVALGQTVRITCQGDSLRSYYASWYQQKPGQAPVLVIYGKNNRPSGIPDRFSGSSSGNTASLTITGAQAEDEADYYCNSRGSSGNHYVFGTGTKVTVL

SEQ ID NO: 1544 - protein, 490 aa, synthetic construct
  REGION 1..490: note = source = /note="Description of Artificial Sequence: Synthetic polypeptide"
MALPVTALLLPLALLLHAARPEVQLVESGGGLVQPGRSLRLSCAASGFTFDDYAMHWVRQAPGKGLEWVSGISWNSGSTGYADSVKGRFTISRDNAKNSLYLQMNSLRAEDTALYYCAKDSSSWYGGGSAFDIWGQGTMVTVSSGGGGSGGGGSGGGGSSSELTQDPAVSVALGQTVRITCQGDSLRSYYASWYQQKPGQAPVLVIYGKNNRPSGIPDRFSGSSSGNTASLTITGAQAEDEADYYCNSRGSSGNHYVFGTGTKVTVLTTTPAPRPPTPAPTIASQPLSLRPEACRPAAGGAVHTRGLDFACDIYIWAPLAGTCGVLLLSLVITLYCKRGRKKLLYIFKQPFMRPVQTTQEEDGCSCRFPEEEEGGCELRVKFSRSADAPAYKQGQNQLYNELNLGRREEYDVLDKRRGRDPEMGGKPRRKNPQEGLYNELQKDKMAEAYSEIGMKGERRRGKGHDGLYQGLSTATKDTYDALHMQALPPR

SEQ ID NO: 1545 - protein, 251 aa, synthetic construct
  REGION 1..251: note = source = /note="Description of Artificial Sequence: Synthetic polypeptide"
QVQLVQSGGGLVQPGGSLRLSCAASGFTFSSYWMHWVRQAPGKGLVWVSRINSDGSSTSYADSVKGRFTISRDNAKNTLYLQMNSLRAEDTAVYYCVRTGWVGSYYYYMDVWGKGTTVTVSSGGGGSGGGGSGGGGSGGGGSEIVLTQSPGTLSLSPGERATLSCRASQSVSSNYLAWYQQKPGQPPRLLIYDVSTRATGIPARFSGGGSGTDFTLTISSLEPEDFAVYYCQQRSNWPPWTFGQGTKVEIK

SEQ ID NO: 1546 - protein, 495 aa, synthetic construct
  REGION 1..495: note = source = /note="Description of Artificial Sequence: Synthetic polypeptide"
MALPVTALLLPLALLLHAARPQVQLVQSGGGLVQPGGSLRLSCAASGFTFSSYWMHWVRQAPGKGLVWVSRINSDGSSTSYADSVKGRFTISRDNAKNTLYLQMNSLRAEDTAVYYCVRTGWVGSYYYYMDVWGKGTTVTVSSGGGGSGGGGSGGGGSGGGGSEIVLTQSPGTLSLSPGERATLSCRASQSVSSNYLAWYQQKPGQPPRLLIYDVSTRATGIPARFSGGGSGTDFTLTISSLEPEDFAVYYCQQRSNWPPWTFGQGTKVEIKTTTPAPRPPTPAPTIASQPLSLRPEACRPAAGGAVHTRGLDFACDIYIWAPLAGTCGVLLLSLVITLYCKRGRKKLLYIFKQPFMRPVQTTQEEDGCSCRFPEEEEGGCELRVKFSRSADAPAYKQGQNQLYNELNLGRREEYDVLDKRRGRDPEMGGKPRRKNPQEGLYNELQKDKMAEAYSEIGMKGERRRGKGHDGLYQGLSTATKDTYDALHMQALPPR

SEQ ID NO: 1547 - protein, 250 aa, synthetic construct
  REGION 1..250: note = source = /note="Description of Artificial Sequence: Synthetic polypeptide"
QVQLVQSGGGVVQPGRSLRLSCAASGFTFSSYGMHWVRQAPGKGLEWVAVISYDGSNKYYADSVKGRFTISRDNSKNTLYLQMNSLRAEDTAVYYCAKGYSRYYYYGMDVWGQGTTVTVSSGGGGSGGGGSGGGGSGGGGSEIVMTQSPATLSLSPGERAILSCRASQSVYTKYLGWYQQKPGQAPRLLIYDASTRATGIPDRFSGSGSGTDFTLTINRLEPEDFAVYYCQHYGGSPLITFGQGTKVDIK

SEQ ID NO: 1548 - protein, 494 aa, synthetic construct
  REGION 1..494: note = source = /note="Description of Artificial Sequence: Synthetic polypeptide"
MALPVTALLLPLALLLHAARPQVQLVQSGGGVVQPGRSLRLSCAASGFTFSSYGMHWVRQAPGKGLEWVAVISYDGSNKYYADSVKGRFTISRDNSKNTLYLQMNSLRAEDTAVYYCAKGYSRYYYYGMDVWGQGTTVTVSSGGGGSGGGGSGGGGSGGGGSEIVMTQSPATLSLSPGERAILSCRASQSVYTKYLGWYQQKPGQAPRLLIYDASTRATGIPDRFSGSGSGTDFTLTINRLEPEDFAVYYCQHYGGSPLITFGQGTKVDIKTTTPAPRPPTPAPTIASQPLSLRPEACRPAAGGAVHTRGLDFACDIYIWAPLAGTCGVLLLSLVITLYCKRGRKKLLYIFKQPFMRPVQTTQEEDGCSCRFPEEEEGGCELRVKFSRSADAPAYKQGQNQLYNELNLGRREEYDVLDKRRGRDPEMGGKPRRKNPQEGLYNELQKDKMAEAYSEIGMKGERRRGKGHDGLYQGLSTATKDTYDALHMQALPPR

SEQ ID NO: 1549 - protein, 249 aa, synthetic construct
  REGION 1..249: note = source = /note="Description of Artificial Sequence: Synthetic polypeptide"
QVQLVQSGGGLVQPGGSLRLSCAASGFTFSSYAMSWVRQAPGKGLEWVSAISGSGGSTYYADSVKGRFTISRDNSKNTLYLQMNSLRAEDTAVYYCAKREAAAGHDWYFDLWGRGTLVTVSSGGGGSGGGGSGGGGSGGGGSDIRVTQSPSSLSASVGDRVTITCRASQSISSYLNWYQQKPGKAPKLLIYAASSLQSGVPSRFSGSGSGTDFTLTISSLQPEDFATYYCQQSYSIPLTFGQGTKVEIK

SEQ ID NO: 1550 - protein, 493 aa, synthetic construct
  REGION 1..493: note = source = /note="Description of Artificial Sequence: Synthetic polypeptide"
MALPVTALLLPLALLLHAARPQVQLVQSGGGLVQPGGSLRLSCAASGFTFSSYAMSWVRQAPGKGLEWVSAISGSGGSTYYADSVKGRFTISRDNSKNTLYLQMNSLRAEDTAVYYCAKREAAAGHDWYFDLWGRGTLVTVSSGGGGSGGGGSGGGGSGGGGSDIRVTQSPSSLSASVGDRVTITCRASQSISSYLNWYQQKPGKAPKLLIYAASSLQSGVPSRFSGSGSGTDFTLTISSLQPEDFATYYCQQSYSIPLTFGQGTKVEIKTTTPAPRPPTPAPTIASQPLSLRPEACRPAAGGAVHTRGLDFACDIYIWAPLAGTCGVLLLSLVITLYCKRGRKKLLYIFKQPFMRPVQTTQEEDGCSCRFPEEEEGGCELRVKFSRSADAPAYKQGQNQLYNELNLGRREEYDVLDKRRGRDPEMGGKPRRKNPQEGLYNELQKDKMAEAYSEIGMKGERRRGKGHDGLYQGLSTATKDTYDALHMQALPPR

SEQ ID NO: 1551 - protein, 247 aa, synthetic construct
  REGION 1..247: note = source = /note="Description of Artificial Sequence: Synthetic polypeptide"
QVQLVQSWAEVKKPGASVKVSCKASGYTFTSYYMHWVRQAPGQGLEWMGIINPSGGSTSYAQKFQGRVTMTRDTSTSTVYMELSNLRSEDTAVYYCARSPRVTTGYFDYWGQGTLVTVSSGGGGSGGGGSGGGGSGGGGSDIQLTQSPSTLSASVGDRVTITCRASQSISSWLAWYQQKPGKAPKLLIYKASSLESGVPSRFSGSGSGTEFTLTISSLQPDDFATYYCQQYSSYPLTFGGGTRLEIK

SEQ ID NO: 1552 - protein, 491 aa, synthetic construct
  REGION 1..491: note = source = /note="Description of Artificial Sequence: Synthetic polypeptide"
MALPVTALLLPLALLLHAARPQVQLVQSWAEVKKPGASVKVSCKASGYTFTSYYMHWVRQAPGQGLEWMGIINPSGGSTSYAQKFQGRVTMTRDTSTSTVYMELSNLRSEDTAVYYCARSPRVTTGYFDYWGQGTLVTVSSGGGGSGGGGSGGGGSGGGGSDIQLTQSPSTLSASVGDRVTITCRASQSISSWLAWYQQKPGKAPKLLIYKASSLESGVPSRFSGSGSGTEFTLTISSLQPDDFATYYCQQYSSYPLTFGGGTRLEIKTTTPAPRPPTPAPTIASQPLSLRPEACRPAAGGAVHTRGLDFACDIYIWAPLAGTCGVLLLSLVITLYCKRGRKKLLYIFKQPFMRPVQTTQEEDGCSCRFPEEEEGGCELRVKFSRSADAPAYKQGQNQLYNELNLGRREEYDVLDKRRGRDPEMGGKPRRKNPQEGLYNELQKDKMAEAYSEIGMKGERRRGKGHDGLYQGLSTATKDTYDALHMQALPPR

SEQ ID NO: 1553 - protein, 253 aa, synthetic construct
  REGION 1..253: note = source = /note="Description of Artificial Sequence: Synthetic polypeptide"
QVQLVQSGAEVRRPGASVKISCRASGDTSTRHYIHWLRQAPGQGPEWMGVINPTTGPATGSPAYAQMLQGRVTMTRDTSTRTVYMELRSLRFEDTAVYYCARSVVGRSAPYYFDYWGQGTLVTVSSGGGGSGGGGSGGGGSGGGGSDIQMTQSPSSLSASVGDRVTITCRASQGISDYSAWYQQKPGKAPKLLIYAASTLQSGVPSRFSGSGSGTDFTLTISYLQSEDFATYYCQQYYSYPLTFGGGTKVDIK

SEQ ID NO: 1554 - protein, 497 aa, synthetic construct
  REGION 1..497: note = source = /note="Description of Artificial Sequence: Synthetic polypeptide"
MALPVTALLLPLALLLHAARPQVQLVQSGAEVRRPGASVKISCRASGDTSTRHYIHWLRQAPGQGPEWMGVINPTTGPATGSPAYAQMLQGRVTMTRDTSTRTVYMELRSLRFEDTAVYYCARSVVGRSAPYYFDYWGQGTLVTVSSGGGGSGGGGSGGGGSGGGGSDIQMTQSPSSLSASVGDRVTITCRASQGISDYSAWYQQKPGKAPKLLIYAASTLQSGVPSRFSGSGSGTDFTLTISYLQSEDFATYYCQQYYSYPLTFGGGTKVDIKTTTPAPRPPTPAPTIASQPLSLRPEACRPAAGGAVHTRGLDFACDIYIWAPLAGTCGVLLLSLVITLYCKRGRKKLLYIFKQPFMRPVQTTQEEDGCSCRFPEEEEGGCELRVKFSRSADAPAYKQGQNQLYNELNLGRREEYDVLDKRRGRDPEMGGKPRRKNPQEGLYNELQKDKMAEAYSEIGMKGERRRGKGHDGLYQGLSTATKDTYDALHMQALPPR

SEQ ID NO: 1555 - protein, 249 aa, synthetic construct
  REGION 1..249: note = source = /note="Description of Artificial Sequence: Synthetic polypeptide"
QVQLQQSGAEVKKPGASVKVSCKASGYTFTNYYMHWVRQAPGQGLEWMGIINPSGGYTTYAQKFQGRLTMTRDTSTSTVYMELSSLRSEDTAVYYCARIRSCGGDCYYFDNWGQGTLVTVSSGGGGSGGGGSGGGGSGGGGSDIQLTQSPSTLSASVGDRVTITCRASENVNIWLAWYQQKPGKAPKLLIYKSSSLASGVPSRFSGSGSGAEFTLTISSLQPDDFATYYCQQYQSYPLTFGGGTKVDIK

SEQ ID NO: 1556 - protein, 493 aa, synthetic construct
  REGION 1..493: note = source = /note="Description of Artificial Sequence: Synthetic polypeptide"
MALPVTALLLPLALLLHAARPQVQLQQSGAEVKKPGASVKVSCKASGYTFTNYYMHWVRQAPGQGLEWMGIINPSGGYTTYAQKFQGRLTMTRDTSTSTVYMELSSLRSEDTAVYYCARIRSCGGDCYYFDNWGQGTLVTVSSGGGGSGGGGSGGGGSGGGGSDIQLTQSPSTLSASVGDRVTITCRASENVNIWLAWYQQKPGKAPKLLIYKSSSLASGVPSRFSGSGSGAEFTLTISSLQPDDFATYYCQQYQSYPLTFGGGTKVDIKTTTPAPRPPTPAPTIASQPLSLRPEACRPAAGGAVHTRGLDFACDIYIWAPLAGTCGVLLLSLVITLYCKRGRKKLLYIFKQPFMRPVQTTQEEDGCSCRFPEEEEGGCELRVKFSRSADAPAYKQGQNQLYNELNLGRREEYDVLDKRRGRDPEMGGKPRRKNPQEGLYNELQKDKMAEAYSEIGMKGERRRGKGHDGLYQGLSTATKDTYDALHMQALPPR

SEQ ID NO: 1557 - protein, 246 aa, synthetic construct
  REGION 1..246: note = source = /note="Description of Artificial Sequence: Synthetic polypeptide"
QITLKESGPALVKPTQTLTLTCTFSGFSLSTAGVHVGWIRQPPGKALEWLALISWADDKRYRPSLRSRLDITRVTSKDQVVLSMTNMQPEDTATYYCALQGFDGYEANWGPGTLVTVSSGGGGSGGGGSGGGGSGGGGSDIVMTQSPSSLSASAGDRVTITCRASRGISSALAWYQQKPGKPPKLLIYDASSLESGVPSRFSGSGSGTDFTLTIDSLEPEDFATYYCQQSYSTPWTFGQGTKVDIK

SEQ ID NO: 1558 - protein, 490 aa, synthetic construct
  REGION 1..490: note = source = /note="Description of Artificial Sequence: Synthetic polypeptide"
MALPVTALLLPLALLLHAARPQITLKESGPALVKPTQTLTLTCTFSGFSLSTAGVHVGWIRQPPGKALEWLALISWADDKRYRPSLRSRLDITRVTSKDQVVLSMTNMQPEDTATYYCALQGFDGYEANWGPGTLVTVSSGGGGSGGGGSGGGGSGGGGSDIVMTQSPSSLSASAGDRVTITCRASRGISSALAWYQQKPGKPPKLLIYDASSLESGVPSRFSGSGSGTDFTLTIDSLEPEDFATYYCQQSYSTPWTFGQGTKVDIKTTTPAPRPPTPAPTIASQPLSLRPEACRPAAGGAVHTRGLDFACDIYIWAPLAGTCGVLLLSLVITLYCKRGRKKLLYIFKQPFMRPVQTTQEEDGCSCRFPEEEEGGCELRVKFSRSADAPAYKQGQNQLYNELNLGRREEYDVLDKRRGRDPEMGGKPRRKNPQEGLYNELQKDKMAEAYSEIGMKGERRRGKGHDGLYQGLSTATKDTYDALHMQALPPR

SEQ ID NO: 1559 - protein, 239 aa, synthetic construct
  REGION 1..239: note = source = /note="Description of Artificial Sequence: Synthetic polypeptide"
QVQLQQSGPELEKPGASVKISCKASGYSFTGYTMNWVKQSHGKSLEWIGLITPYNGASSYNQKFRGKATLTVDKSSSTAYMDLLSLTSEDSAVYFCARGGYDGRGFDYWGQGTTVTVSSGGGGSGGGGSGGGGSDIELTQSPAIMSASPGEKVTMTCSASSSVSYMHWYQQKSGTSPKRWIYDTSKLASGVPGRFSGSGSGNSYSLTISSVEAEDDATYYCQQWSGYPLTFGAGTKLEI

SEQ ID NO: 1560 - protein, 383 aa, synthetic construct
  REGION 1..383: note = source = /note="Description of Artificial Sequence: Synthetic polypeptide"
MALPVTALLLPLALLLHAARPQVQLQQSGPELEKPGASVKISCKASGYSFTGYTMNWVKQSHGKSLEWIGLITPYNGASSYNQKFRGKATLTVDKSSSTAYMDLLSLTSEDSAVYFCARGGYDGRGFDYWGQGTTVTVSSGGGGSGGGGSGGGGSDIELTQSPAIMSASPGEKVTMTCSASSSVSYMHWYQQKSGTSPKRWIYDTSKLASGVPGRFSGSGSGNSYSLTISSVEAEDDATYYCQQWSGYPLTFGAGTKLEITTTPAPRPPTPAPTIASQPLSLRPEACRPAAGGAVHTRGLDFACDIYIWAPLAGTCGVLLLSLVITLYCKRGRKKLLYIFKQPFMRPVQTTQEEDGCSCRFPEEEEGGCELRVKFSRSADAPA
